(19) United States
(12) Patent Application Publication
(10) Pub. No.: US 2024/0082369 A1
(43) Pub. Date: Mar. 14, 2024

(54) IMPROVED RECEPTOR-BINDING DOMAIN OF BOTULINUM NEUROTOXIN A AND USES THEREOF

(71) Applicant: Children's Medical Center Corporation, Boston, MA (US)

(72) Inventors: Min Dong, Weatogue, CT (US); Pyung-Gang Lee, Boston, MA (US)

(73) Assignee: Children's Medical Center Corporation, Boston, MA (US)

(21) Appl. No.: 18/268,477

(22) PCT Filed: Dec. 20, 2021
(86) PCT No.: PCT/US2021/064332

§ 371 Date: Jun. 20, 2023

Related U.S. Application Data
(60) Provisional application No. 63/128,758, filed on Dec. 21, 2020.

(51) Int. Cl. A61K 38/48; A61K 8/66; A61Q 19/00; C12N 9/52

(52) U.S. Cl. CPC A61K 38/4893; A61K 8/66; A61Q 19/00; C12N 9/52; C12Y 304/24069

(57) ABSTRACT

Disclosed herein are modified Clostridial Botulinum neurotoxin (BoNT) polypeptides with a modified receptor binding domain of Clostridial Botulinum serotype A1 or A2. Modifications include substitution amino acid mutations. Isolated modified receptor binding domains, chimeric molecules, pharmaceutical compositions, and methods of using the same are also disclosed.

### RELATED APPLICATIONS

[0001] This application claims the benefit under 35 U.S.C. § 119(e) of U.S. provisional application No. 63/128,758, titled “IMPROVED RECEPTOR-BINDING DOMAIN OF BOTULINUM NEUROTOXIN A AND USES THEREOF,” filed Dec. 21, 2020, the entire contents of which are incorporated herein by reference.

### FEDERALLY SPONSORED RESEARCH

[0002] This invention was made with government support under Grant No: NS080833 awarded by the National Institutes of Health. The government has certain rights in the invention.

### BACKGROUND

[0003] In recent years, Clostridial Botulinum neurotoxin (BoNT) have been widely used to treat a growing list of medical conditions: local injections of minute amount of toxins can attenuate neuronal activity in targeted regions, which can be beneficial in many medical conditions as well as for cosmetic purposes. To date, BoNT serotype A (BoNT/A) and BoNT serotype B (BoNT/B) are the only two BoNTs that are currently FDA-approved for use in humans. The major limitation is the generation of neutralizing antibodies in patients, which renders future treatment ineffective. Termination of BoNT usage often leaves patients with no other effective ways to treat/relieve their disorders. Adverse effects associated with BoNT use range from transient nonserious events such as ptosis and diplopia to life-threatening events even death.

### SUMMARY

[0004] The limitations and adverse effects of BoNTs are largely correlated with dose. Provided herein are modified BoNTs with improved activity. The modified BoNTs described herein maintain the same level of toxin activity with lower dose, thus reducing the possibility of the generation of neutralizing antibodies in patients and adverse side effects.

[0005] Some aspects of the present disclosure provide modified Clostridial Botulinum neurotoxin (BoNT) polypeptides comprising a modified receptor binding domain of Clostridial Botulinum serotype A1 (BoNT/A1) or a modified receptor binding domain of Clostridial Botulinum serotype A1 (BoNT/A2). In some aspects, the present disclosure provides modified receptor binding domains of BoNT/A1 or BoNT/A2. In some aspects, the present disclosure provides chimeric BoNT polypeptides comprising a modified receptor binding domain of BoNT/A1 or BoNT/A2. In some embodiments, a BoNT comprising the modified receptor binding domain of a BoNT/A1 or BoNT/A2 increases binding of the BoNT to a BoNT receptor protein compared to a BoNT comprising a wildtype BoNT/A1 or BoNT/A2 receptor binding domain. In some embodiments, a BoNT comprising the modified receptor binding domain of BoNT/A1 or BoNT/A2 reduces systemic toxicity at a dosage that induces the same degree of paralysis as a BoNT comprising a wildtype BoNT/A1 or BoNT/A2 receptor binding domain.

[0006] In some embodiments, a BoNT comprising the modified receptor binding domain of a BoNT/A1 or BoNTA2 increases local paralysis compared to a BoNT comprising a wildtype BoNT/A receptor binding domain. In some embodiments, local paralysis induced by a BoNT comprising a modified BoNT/A1 or BoNT/A2 receptor binding domain is quantified using a Digital Abduction Score (DAS) assay. In some embodiments, the BoNT comprising a modified BoNT/A1 or BoNT/A2 receptor binding domain has an increased DAS score as compared by a wildtype BoNT. In some embodiments, the DAS score of BoNT comprising a modified BoNT/A1 or BoNT/A2 receptor binding domain is greater than the DAS Score of a wildtype BoNT by 0.5, 1, 2, 3 or 4. In some embodiments, the DAS score of BoNT comprising a modified BoNT/A1 or BoNT/A2 receptor binding domain is greater than the DAS Score of a wildtype BoNT by at least 0.5, 1, 2, 3 or 4. In some embodiments, the BoNT comprising a modified BoNT/A1 or BoNT/A2 receptor binding domain has a DAS score of at least 1 (e.g. at least 1, at least 2, at least 3, or least 4). In some embodiments, the BoNT comprising a modified BoNT/A1 or BoNT/A2 receptor binding domain has a DAS score of 1-2, 2-3, or 3-4.

[0007] In some embodiments, the modified Clostridial Botulinum neurotoxin (BoNT) polypeptide comprises a modified receptor binding domain of Clostridial Botulinum serotype A1 (BoNT/A1) comprising one or more amino acid substitutions at positions corresponding to 917, 953, 954, 955, 957, 968, 1025, 1026, 1052, 1062, 1063, 1064, 1065, 1066, 1145, 1156, 1232, 1272, 1278, 1288, 1289, 1292, 1294, and 1295 in SEQ ID NO: 1.

[0008] In some embodiments, the modified Clostridial Botulinum neurotoxin (BoNT) polypeptide comprises a modified receptor binding domain of Clostridial Botulinum serotype A1 (BoNT/A1) comprising one or more amino acid substitutions at positions corresponding to 954, 955, 957, 1063, 1064, 1025, 1026, 1156, 1232, 1278, 1294, and 1295 in SEQ ID NO: 1.

[0009] In some embodiments, the modified Clostridial Botulinum neurotoxin (BoNT) polypeptide comprises a modified receptor binding domain of Clostridial Botulinum serotype A1 (BoNT/A1) comprising an amino acid substitution at a position corresponding to 917 in SEQ ID NO: 1, optionally wherein the amino acid substitution corresponds to F917R or F917K in SEQ ID NO: 1.

[0010] In some embodiments, the modified receptor binding domain of the modified BoNT/A1 polypeptide comprises an amino acid substitution at a position corresponding to 953 in SEQ ID NO: 1, optionally wherein the amino acid substitution corresponds to F953H or F953Y in SEQ ID NO: 1.

[0011] In some embodiments, the modified receptor binding domain of the modified BoNT/A1 polypeptide comprises an amino acid substitution at a position corresponding to 954 in SEQ ID NO: 1, optionally wherein the amino acid substitution corresponds to N954S in SEQ ID NO: 1.

[0012] In some embodiments, the modified receptor binding domain of the modified BoNT/A1 polypeptide comprises an amino acid substitution at a position corresponding to 955 in SEQ ID NO: 1, optionally wherein the amino acid substitution corresponds to S955K in SEQ ID NO: 1.

[0013] In some embodiments, the modified receptor binding domain of the modified BoNT/A1 polypeptide comprises an amino acid substitution at a position corresponding to 957 in SEQ ID NO: 1, optionally wherein the amino acid substitution corresponds to S957N, S957Q, or S957Y in SEQ ID NO: 1.

[0014] In some embodiments, the modified receptor binding domain of the modified BoNT/A1 polypeptide comprises an amino acid substitution at a position corresponding to 968 in SEQ ID NO: 1, optionally wherein the amino acid substitution corresponds to M968I in SEQ ID NO: 1.

[0015] In some embodiments, the modified receptor binding domain of the modified BoNT/A1 polypeptide comprises an amino acid substitution at a position corresponding to 1025 in SEQ ID NO: 1, optionally wherein the amino acid substitution corresponds to N1025T in SEQ ID NO: 1.

[0016] In some embodiments, the modified receptor binding domain of the modified BoNT/A1 polypeptide comprises an amino acid substitution at a position corresponding to 1026 in SEQ ID NO: 1, optionally wherein the amino acid substitution corresponds to N1026K in SEQ ID NO: 1.

[0017] In some embodiments, the modified receptor binding domain of the modified BoNT/A1 polypeptide comprises an amino acid substitution at a position corresponding to 1052 in SEQ ID NO: 1, optionally wherein the amino acid substitution corresponds to N1052K in SEQ ID NO: 1.

[0018] In some embodiments, the modified receptor binding domain of the modified BoNT/A1 polypeptide comprises an amino acid substitution at a position corresponding to 1062 in SEQ ID NO: 1, optionally wherein the amino acid substitution corresponds to D1062E in SEQ ID NO: 1.

[0019] In some embodiments, the modified receptor binding domain of the modified BoNT/A1 polypeptide comprises an amino acid substitution at a position corresponding to 1063 in SEQ ID NO: 1, optionally wherein the amino acid substitution corresponds to T1063P in SEQ ID NO: 1.

[0020] In some embodiments, the modified receptor binding domain of the modified BoNT/A1 polypeptide comprises an amino acid substitution at a position corresponding to 1064 in SEQ ID NO: 1, optionally wherein the amino acid substitution corresponds to H1064R or H1064Q in SEQ ID NO: 1.

[0021] In some embodiments, the modified receptor binding domain of the modified BoNT/A1 polypeptide comprises an amino acid substitution at a position corresponding to 1065 in SEQ ID NO: 1, optionally wherein the amino acid substitution corresponds to R1065N in SEQ ID NO: 1.

[0022] In some embodiments, the modified receptor binding domain of the modified BoNT/A1 polypeptide comprises an amino acid substitution at a position corresponding to 1066 in SEQ ID NO: 1, optionally wherein the amino acid substitution corresponds to Y1066R or Y1066K in SEQ ID NO: 1.

[0023] In some embodiments, the modified receptor binding domain of the modified BoNT/A1 polypeptide comprises an amino acid substitution at a position corresponding to 1145 in SEQ ID NO: 1, optionally wherein the amino acid substitution corresponds to T1145Y in SEQ ID NO: 1.

[0024] In some embodiments, the modified receptor binding domain of the modified BoNT/A1 polypeptide comprises an amino acid substitution at a position corresponding to 1156 in SEQ ID NO: 1, optionally wherein the amino acid substitution corresponds to R1156M or R1156I in SEQ ID NO: 1.

[0025] In some embodiments, the modified receptor binding domain of the modified BoNT/A1 polypeptide comprises an amino acid substitution at a position corresponding to 1232 in SEQ ID NO: 1, optionally wherein the amino acid substitution corresponds to T1232R or T1232K in SEQ ID NO: 1.

[0026] In some embodiments, the modified receptor binding domain of the modified BoNT/A1 polypeptide comprises an amino acid substitution at a position corresponding to 1272 in SEQ ID NO: 1, optionally wherein the amino acid substitution corresponds to E1272G in SEQ ID NO: 1.

[0027] In some embodiments, the modified receptor binding domain of the modified BoNT/A1 polypeptide comprises an amino acid substitution at a position corresponding to 1278 in SEQ ID NO: 1, optionally wherein the amino acid substitution corresponds to L1278F, L1278Y, or L1278W in SEQ ID NO: 1.

[0028] In some embodiments, the modified receptor binding domain of the modified BoNT/A1 polypeptide comprises an amino acid substitution at a position corresponding to 1288 in SEQ ID NO: 1, optionally wherein the amino acid substitution corresponds to D1288E or D1288N in SEQ ID NO: 1.

[0029] In some embodiments, the modified receptor binding domain of the modified BoNT/A1 polypeptide comprises an amino acid substitution at a position corresponding to 1289 in SEQ ID NO: 1, optionally wherein the amino acid substitution corresponds to D1289Y in SEQ ID NO: 1.

[0030] In some embodiments, the modified receptor binding domain of the modified BoNT/A1 polypeptide comprises an amino acid substitution at a position corresponding to 1292 in SEQ ID NO: 1, optionally wherein the amino acid substitution corresponds to G1292R or G1292K in SEQ ID NO: 1.

[0031] In some embodiments, the modified receptor binding domain of the modified BoNT/A1 polypeptide comprises an amino acid substitution at a position corresponding to 1294 in SEQ ID NO: 1, optionally wherein the amino acid substitution corresponds to R1294S or R1294T in SEQ ID NO: 1.

[0032] In some embodiments, the modified receptor binding domain of the modified BoNT/A1 polypeptide comprises an amino acid substitution at a position corresponding to 1295 in SEQ ID NO: 1, optionally wherein the amino acid substitution corresponds to P1295S or P1295T in SEQ ID NO: 1.

[0033] In some embodiments, the modified receptor binding domain of the modified BoNT/A1 polypeptide comprises an amino acid sequence that is at least 80% identical to the amino acid sequence of SEQ ID NO: 51-85

[0034] In some embodiments, the modified receptor binding domain of the modified BoNT/A1 polypeptide comprises the amino acid sequence of any one of SEQ ID NOs:51-85.

In some embodiments, the modified receptor binding domain of the modified BoNT/A1 polypeptide further comprises a protease domain and a translocation domain from BoNT/A1.
In some embodiments, the modified BoNT/A1 polypeptide comprises an amino acid sequence that is at least 80% identical to the amino acid sequence of SEQ ID NO: 3-37.
In some embodiments, the modified BoNT/A1 polypeptide comprises the amino acid sequence of SEQ ID NO: 3-37.

[0035] In some embodiments, the modified BoNT/A1 polypeptide comprises a protease domain and a translocation domain from a second BoNT optionally wherein the second BoNT is of serotype B, C, D, E, F, G, H, X, or En.

[0036] In some embodiments, the modified BoNT/A1 polypeptide comprising a protease domain and a translocation domain from a second BoNT comprises an amino acid sequence that is at least 80% identical to the amino acid sequence of any one of SEQ ID NO: 97-105 fused to any one of SEQ ID NO: 51-85.

[0037] In some embodiments, the modified BoNT/A1 polypeptide comprising a protease domain and a translocation domain from a second BoNT comprises the amino acid sequence of any one of SEQ ID NO: 97-105 fused to any one of SEQ ID NO: 51-85.

[0038] In some embodiments, the modified Clostridial Botulinum neurotoxin (BoNT) polypeptide comprises a modified receptor binding domain of Clostridial Botulinum serotype A2 (BoNT/A2) comprising one or more amino acid substitutions at positions corresponding to 915, 923, 1090, 1103, 1117, 1156, 1170, 1227, 1254, 1255, or 1256 in SEQ ID NO: 2.

In some embodiments, the modified receptor binding domain of the modified BoNT/A2 polypeptide comprises an amino acid substitution at a position corresponding to 915 in SEQ ID NO: 2, optionally wherein the amino acid substitution corresponds to K915Q in SEQ ID NO: 2.

[0039] In some embodiments, the modified receptor binding domain of the modified BoNT/A2 polypeptide comprises an amino acid substitution at a position corresponding to 923 in SEQ ID NO: 2, optionally wherein the amino acid substitution corresponds to T923K in SEQ ID NO: 2.

In some embodiments, the modified receptor binding domain of the modified BoNT/A2 polypeptide comprises an amino acid substitution at a position corresponding to 1090 in SEQ ID NO: 2, optionally wherein the amino acid substitution corresponds to S1090N in SEQ ID NO: 2.

[0040] In some embodiments, the modified receptor binding domain of the modified BoNT/A2 polypeptide comprises an amino acid substitution at a position corresponding to 1103 in SEQ ID NO: 2, optionally wherein the amino acid substitution corresponds to N1103D in SEQ ID NO: 2.

[0041] In some embodiments, the modified receptor binding domain of the modified BoNT/A2 polypeptide comprises an amino acid substitution at a position corresponding to 1117 in SEQ ID NO: 2, optionally wherein the amino acid substitution corresponds to F1117Y in SEQ ID NO: 2.

[0042] In some embodiments, the modified receptor binding domain of the modified BoNT/A2 polypeptide comprises an amino acid substitution at a position corresponding to 1156 in SEQ ID NO: 2, optionally wherein the amino acid substitution corresponds to E1156M in SEQ ID NO: 2.

[0043] In some embodiments, the modified receptor binding domain of the modified BoNT/A2 polypeptide comprises an amino acid substitution at a position corresponding to 1170 in SEQ ID NO: 2, optionally wherein the amino acid substitution corresponds to E1170K in SEQ ID NO: 2.

[0044] In some embodiments, the modified receptor binding domain of the modified BoNT/A2 polypeptide comprises an amino acid substitution at a position corresponding to 1227 in SEQ ID NO: 2, optionally wherein the amino acid substitution corresponds to D1227N in SEQ ID NO: 2.

[0045] In some embodiments, the modified receptor binding domain of the modified BoNT/A2 polypeptide comprises an amino acid substitution at a position corresponding to 1254 in SEQ ID NO: 2, optionally wherein the amino acid substitution corresponds to L1254Q in SEQ ID NO: 2.

[0046] In some embodiments, the modified receptor binding domain of the modified BoNT/A2 polypeptide comprises an amino acid substitution at a position corresponding to 1255 in SEQ ID NO: 2, optionally wherein the amino acid substitution corresponds to Y1255F in SEQ ID NO: 2.

[0047] In some embodiments, the modified receptor binding domain of the modified BoNT/A2 polypeptide comprises an amino acid substitution at a position corresponding to 1256 in SEQ ID NO: 2, optionally wherein the amino acid substitution corresponds to D1256N in SEQ ID NO: 2.

[0048] In some embodiments, the modified receptor binding domain of the modified BoNT/A2 polypeptide comprises an amino acid sequence that is at least 80% identical to the amino acid sequence of SEQ ID NO: 86-96.

[0049] In some embodiments, the modified receptor binding domain of the modified BoNT/A2 polypeptide comprises the amino acid sequence of any one of SEQ ID NOs: 86-96

[0050] In some embodiments, the modified BoNT/A2 polypeptide further comprises a protease domain and a translocation domain from BoNT/A1. In some embodiments, the modified BoNT/A2 polypeptide comprises an amino acid sequence that is at least 80% identical to the amino acid sequence of SEQ ID NO: 38-48. In some embodiments, the modified BoNT/A2 polypeptide comprises the amino acid sequence of SEQ ID NO: 38-48. In some embodiments, the modified BoNT/A2 polypeptide, further comprises a protease domain and a translocation domain from a second BoNT, optionally wherein the second BoNT is of serotype B, C, D, E, F, G, H, X, or En. In some embodiments, the modified BoNT/A2 polypeptide comprising a protease domain and a translocation domain from a second BoNT comprises an amino acid sequence is at least 80% identical to the amino acid sequence of any one of SEQ ID NO: 97-105 fused to any one of SEQ ID NO: 86-96. In some embodiments, the modified BoNT/A2 polypeptide comprising a protease domain and a translocation domain from a second BoNT comprises the amino acid sequence of any one of SEQ ID NO: 97-105 fused to any one of SEQ ID NO: 86-96.

[0051] In certain aspects, a nucleic acid molecule comprises a polynucleotide encoding any one of the modified BoNT polypeptides, modified receptor binding domains, or chimeric BoNTs described herein. In some embodiments, a nucleic acid vector comprises the nucleic acid molecule comprising the polynucleotide encoding any one of the modified BoNT polypeptides, modified receptor binding domains, or chimeric BoNTs described herein. In some embodiments, a cell comprises the nucleic acid molecule or the nucleic acid vector encoding any one of the modified BoNT polypeptides, modified receptor binding domains, or chimeric BoNTs described herein.

[0052] In some aspects the present disclosure provides methods of producing a modified BoNT polypeptide comprising the steps of culturing the cell comprising the nucleic acid molecule or the nucleic acid vector encoding any one of the modified BoNT polypeptides, modified receptor binding domains, or chimeric BoNTs described herein under conditions wherein the modified BoNT polypeptide is produced. In some embodiments, the method of producing a modified BoNT polypeptide further comprises recovering the modified BoNT polypeptide from the culture.

[0053] In some aspects, a pharmaceutical composition comprises the modified BoNT polypeptide of any one of the modified BoNT polypeptides, the modified receptor binding domains, or the chimeric BoNTs described herein or a nucleic acid or nucleic acid vector encoding any one of the modified BoNT polypeptides, modified receptor binding domains, chimeric BoNTs described herein. In some embodiments, the pharmaceutical composition further comprises a pharmaceutically acceptable excipient.

[0054] In some aspects, a kit comprising a pharmaceutical composition described herein is provided with directions for therapeutic administration of the pharmaceutical composition. In some aspects, the disclosure provides a method of treating a condition, the method comprising administering a therapeutically effective amount of the modified BoNT polypeptide, modified BoNT receptor binding domain or a modified Chimeric BoNT described herein, or the pharmaceutical compositions described herein to a subject to treat the condition. In some embodiments, the condition to be treated is associated with overactive neurons or glands.

[0055] In some embodiments, the condition is selected from the group consisting of: spasmodic dysphonia, spasmodic torticollis, laryngeal dystonia, oromandibular dysphonia, lingual dystonia, cervical dystonia, focal hand dystonia, blepharospasm, strabismus, hemifacial spasm, eyelid disorder, cerebral palsy, focal spasticity and other voice disorders, spasmodic colitis, neurogenic bladder, anismus, limb spasticity, tics, tremors, bruxism, anal fissure, achalasia, dysphagia and other muscle tone disorders and other disorders characterized by involuntary movements of muscle groups, lacrimation, hyperhydrosis, excessive salivation, excessive gastrointestinal secretions, secretory disorders, pain from muscle spasms, headache pain, dermatological or aesthetic/cosmetic conditions, obesity/reduced appetite, depression.

[0056] In some embodiments, the condition is not associated with unwanted neuronal activity. In some embodiments, the condition is selected from the group consisting of: psoriasis, allergy, haemophagocytic lymphohistiocytosis, and alcoholic pancreatic disease.

[0057] In some embodiments, treating a condition comprises administering via injection to where unwanted neuronal activity is present.

[0058] Other aspects of the present disclosure provide use of the modified BoNT polypeptide, modified BoNT receptor binding domain or a modified Chimeric BoNT, or the pharmaceutical compositions described herein treating a condition associated with unwanted neuronal activity.

[0059] Further provided herein are uses of the modified BoNT polypeptide, modified BoNT receptor binding domain or a modified Chimeric BoNT, or the pharmaceutical compositions described herein in medicine.

[0060] Further provided herein are cosmetic uses of the modified BoNT polypeptide, modified BoNT receptor binding domain or a modified Chimeric BoNT, or the pharmaceutical compositions described herein.

### BRIEF DESCRIPTION OF DRAWINGS

[0061] The accompanying drawings are not intended to be drawn to scale. In the drawings, each identical or nearly identical component that is illustrated in various figures is represented by a like numeral. For purposes of clarity, not every component may be labeled in every drawing. In the drawings:

[0062] FIGS. 1A-1B show the schematic view of BoNT action and its domains: (FIG. 1A) A schematic view of BoNT actions: BoNTs recognize neurons by binding to their specific receptors, enter neurons via receptor-mediated endocytosis, the light chains of BoNTs then translocate across endosomal membranes into the cytosol, where these light chains act as proteases to cleave target host proteins. FIG. 1A is adapted from Arnon, S. et al, JAMA, 285:1059, 2001 31. (FIG. 1B) BoNTs are composed of a light chain and a heavy chain, connected via a disulfide bond. The heavy chain can be further divided into two domains: the translocation domain (H_{N}) and the receptor binding domain (H_{C}).

[0063] FIGS. 2A-2B show the sequence alignment of BoNT/A subtypes and the selected mutation sites: (FIG. 2A) Sequence alignment of the H_{C}s of BoNT/A1-A8 and BoNT/H, with the selected consensus mutation site noted with boxes. (FIG. 2B) Crystal structure of H_{C}/A1 with targeted mutagenesis sites labeled.

[0064] FIG. 3 shows H_{C}/A-SV2 complex structure with selected mutagenesis sites labeled for enhancing binding to glycosylated SV2: Crystal structure of H_{C}/A1 complexed with glycosylated SV2C-LD4 (PDB: 5JLV) are shown with glycan moiety. The residues involved in glycan binding are marked as black with residue label.

[0065] FIG. 4A-4F show sortase-mediated ligation of toxins: (FIG. 4A) A schematic drawing of sortase ligation: A1-LC-H_{N} has a sortase tag (LPETG) on its C-terminus which can be ligated with N-terminal free glycine of A1-H_{C} by sortase. After ligation, the full-length protein should be activated by thrombin to cleave a linker between LC and H_{N} to obtain its functional activity. (FIGS. 4B-4F) SDS-PAGE gel image showing the ligation and activation. The full-length ligated toxins (fl-BoNT/A) can be shown at ˜150 kDa without treatment of 2-mercaptoethanol (2-ME), but separated into LC and HC with 2-ME. All the mutant toxins tested in this study were ligated and analyzed using this method.

[0066] FIG. 5A-5E show evaluation of mutant toxins in vivo using DAS assays: (FIG. 5A) A standard scoring for DAS assay. Score 0 means normal, while score 4 represents most severe paralysis. (FIG. 5B) DAS results of H_{C}/A1 mutants: NSIS954-957SKIN, TQEIK990-994NKQNI, T1063P/H1064R and L1278F along with H_{C}/A1-WT (control). These mutants showed similar or reduced activity compared to WT. The most detrimental mutations were T1063P/H1064R. (FIG. 5C) DAS results of H_{C}/A1 mutants: F917R, F917K, N954Q, S957Q and D1289Y along with H_{C}/A1-WT (control). These mutants target glycan binding sites of the toxin. All tested 5 mutants showed reduced activity compared to WT, while S957Q showed no paralysis. (FIG. 5D) DAS results of H_{C}/A1 mutants: N1025T/N1026K, R1156M, T1232R, and R1294S/P1295S along with H_{C}/A1-WT (control). These mutants all showed significantly higher paralysis than WT. (FIG. 5E) DAS results of H_{C}/A1 mutants: T1063P and H1064Q along with H_{C}/A1-WT. T1063P showed higher scores than WT, while H1064Q showed reduced activity compared to WT.

### DETAILED DESCRIPTION OF CERTAIN EMBODIMENTS

[0067] Clostridium botulinum neurotoxins (BoNTs) are a family of bacterial toxins produced by Clostridium bacteria, with seven well-established serotypes (BoNT/A-G) ^{1, 32-33} and two recently discovered serotypes X and EN described in U.S. patent application Ser. Nos. 16/315,698 and 16/651,720 (both incorporated herein by reference). They are one of the most dangerous potential bio-terrorism agents, classified as a “Category A” select agent by Center for Disease Control (CDC) of United States ³¹. These toxins are produced as a single polypeptide and can be separated by bacterial or host proteases into a light chain (LC, ˜50 kDa) and a heavy chain (HC, ˜100 kDa). The two chains remain connected via an inter-chain disulfide bond. The HC contains two sub-domains: the N-terminal H_{N} domain that mediates translocation of the LC across endosomal membranes, and the C-terminal H_{C} domain that mediates binding to receptors on neurons. The inter-chain disulfide bond is reduced once the LC translocates into the cytosol ³⁴⁻³⁵. Released LC acts as a protease to specifically cleave a set of neuronal proteins: BoNT/A, C, and E cleave at distinct sites on a protein known as SNAP-25; BoNT/B, D, F, and G cleave at different sites on a vesicle protein VAMP; and BoNT/C also cleaves a transmembrane protein syntaxin 1 ^{1, 32-33}. These three proteins form a complex, known as SNARE complex, which is essential for release of neurotransmitters ³⁶⁻³⁷. Cleavage of any one of these three SNARE proteins blocks neurotransmitters release from neurons, thus paralyzing muscles. Recently discovered BoNT/X cleaves SNARE proteins like other BoNTs, but also cleaves non-canonical substrates VAMP4, VAMP5 and Ykt6. Recently discovered BoNT/EN cleaves VAMP1/2/3 and several other SNARE proteins including SNAP-25, SNAP-23, syntaxin 1B and syntaxin 4.

[0068] BoNTs are the most potent toxins known and cause the human and animal disease known as botulism ³³. The major form of botulism is caused by ingesting food contaminated with BoNTs (food botulism). Other forms also exist such as infant botulism, which is due to colonization of the intestine by toxin-producing bacteria in infants. BoNTs are always produced together with another 150 kDa protein known as NTNHA (non-toxic non-hemagglutinin protein), which forms a pH-dependent complex with BoNTs and protects BoNTs from proteases in the gastrointestinal tract ³⁸.

[0069] Because local injections of minute amounts of toxins can attenuate neuronal activity in targeted regions, BoNTs have been used to treat a growing list of medical conditions ³⁻⁵, including muscle spasms, chronic pain, overactive bladder problems, as well as for cosmetic applications. The market for BoNTs has already surpassed $3 billion in 2018. Among the seven types of BoNT toxins, BoNT/A and BoNT/B are the two toxins that are currently FDA-approved for use in humans ³⁻⁵. BoNT/A is the dominant type used for both medical and cosmetic applications, marketed as Botox from Allergan Inc., Dysport from IPSEN Inc., and Xeomin from Merz Inc. BoNT/B is marketed as Myobloc by USWorld Med.

[0070] As the application of BoNTs grows, limitations and adverse effects have been reported. The major limitation is the generation of neutralizing antibodies in patients, which renders future treatment ineffective ⁶. Termination of BoNT usage often leaves patients with no other effective ways to treat or relieve their disorders. The probability of antibody responses is directly related to both toxin doses and the frequency of injection ⁶. Therefore, this limitation mainly occurs in treating muscle spasms, which involves high dose of toxins. Consistently, antibody responses have not been observed in cosmetic applications, which use extremely low toxin doses ⁶.

[0071] The major adverse effects are also often associated with treating muscle spasms, but not cosmetic applications. This is because the adverse effects are largely due to diffusion of toxins to other regions of the body and the possibility of toxin diffusion is directly related to injected doses. The adverse effects range from transient non-serious events such as ptosis and diplopia to life-threatening events even death ^{7, 8}. In a petition letter filed in 2008 by Dr. Sidney Wolfe to FDA, a total of 180 serious adverse events, including 16 deaths have been documented. As a result, FDA now requires the “Black box warning” on all BoNT products, highlighting the risk of the spread of toxins, following similar warnings issued by the European Union.

[0072] Because both the generation of neutralizing antibodies and toxin diffusion are directly related to injected doses, lowering toxin doses (while maintaining the same levels of toxin activity) is highly desired, which means the efficacy of individual toxin molecules to induce local muscle paralysis has to be enhanced. Such modified BoNTs with improved local efficacy would also reduce any potential off-target effects due to toxin diffusion to other regions.

[0073] The action of BoNTs has three major steps: (1) receptor binding: these toxins target motor nerve terminals by first binding specifically to their receptors expressed in neurons; (2) translocation: after binding to receptors, BoNTs enter cells via receptor-mediated endocytosis into endosomes, and the low pH conditions within endosomes then induce conformational changes of toxin, resulting in its penetration of endosomal membrane and release of its protease domain into the cytosol of neurons; (3) substrate cleavage: within the cytosol of neurons, the released protease domain of BoNTs then cleave proteins required for synaptic transmission, therefore blocking neurotransmission ². Corresponding to these three steps of action, BoNTs are composed of three functional domains ²: (1) the C-terminal receptor-binding domain (H_{C}, ˜50 kDa); (2) the membrane translocation domain in the middle (H_{N}, ˜50 kDa); (3) the N-terminal protease domain (also known as light chain, LC, ˜50 kDa). The H_{C} and H_{N} together form the heavy chain (HC, ˜100 kDa).

[0074] Receptor-binding appears to be a rate-limiting step. For instance, enhancing the ability of BoNTs to recognize their neuronal receptors will facilitate absorbance of toxins into neurons at the injection site, therefore shielding toxins from triggering immune responses and also preventing their diffusion. Enhanced affinity and specificity to neuronal receptors will also reduce potential off-target effects due to non-specific entry into other cell types. The receptors for most BoNTs have been identified in recent years. BoNT/B, G, and a mosaic toxin DC share two homologous synaptic vesicle proteins synaptotagmin I and II (Syt I/II) as their receptors ⁹⁻¹⁶. Another family of synaptic vesicle protein SV2 acts as receptors for BoNT/A, E, D, and potentially F ^{10, 17-22}. In addition to protein receptors, all BoNTs require lipid co-receptor gangliosides, which are abundant on neuronal surfaces ²³.

[0075] Accordingly, some aspects of the present disclosure provide modified Clostridial Botulinum neurotoxins (BoNT) comprising a modified receptor binding domain of Clostridial Botulinum serotype A (BoNT/A). In some embodiments, a BoNT comprising the modified receptor binding domain of a BoNT/A increases binding of the BoNT to a BoNT receptor protein compared to a BoNT comprising a wildtype BoNT/A receptor binding domain. In some embodiments, a BoNT comprising the modified receptor binding domain of BoNT/A reduces systemic toxicity at a dosage that induces the same degree of local paralysis as a BoNT comprising a wildtype BoNT/A receptor binding domain. In some embodiments, a BoNT comprising the modified receptor binding domain of a BoNT/A increases local paralysis compared to a BoNT comprising a wildtype BoNT/A receptor binding domain.

[0076] As used herein, the term “Clostridial Botulinum neurotoxin (BoNT)” encompasses any polypeptide or fragment from a Botulinum neurotoxin. In some embodiments, the term BoNT refers to a full-length BoNT. In some embodiments, the term BoNT refers to a fragment of the BoNT that can execute the overall cellular mechanism whereby a BoNT enters a neuron and inhibits neurotransmitter release. In some embodiments, the term BoNT simply refers to a fragment of the BoNT, without requiring the fragment to have any specific function or activity. Other terms that may be used throughout the present disclosure for “Clostridial Botulinum neurotoxins” may be BoNTs, Botulinum toxins, or C. Botulium toxins. It is to be understood that these terms are used interchangeably.

[0077] A “modified Clostridial Botulinum neurotoxin (BoNT)” encompasses a BoNT comprising any modifications in the amino acid sequence, e.g., truncation, addition, amino acid substitution, and any combination thereof. For example, a BoNT/A1 comprising amino acid substitution mutation in F917 or S955 is a modified BoNT. In another example, a fragment or a domain of the full-length BoNT (e.g., the receptor binding domain) is considered a modified BoNT. In some embodiments, a domain of the BoNT may also comprise amino acid substitution mutation(s), e.g., a receptor binding domain comprising substitution mutation at positions corresponding to F917R or S955 of the full-length BoNT.

[0078] As used herein, the term “Clostridial Botulinum neurotoxin (BoNT) protease domain” means a BoNT domain that can execute the enzymatic target modification step of the intoxication process. Thus, a BoNT protease domain specifically targets a C. Botulinum toxin substrate and encompasses the proteolytic cleavage of a C. Botulinum toxin substrate, such as, e.g., SNARE proteins like a SNAP-25 substrate, a VAMP substrate and a Syntaxin substrate.

[0079] As used herein, the term “Clostridial Botulinum neurotoxin (BoNT) translocation domain” or “H_{N}” means a BoNT domain that can execute the translocation step of the intoxication process that mediates BoNT light chain translocation. Thus, an H_{N} facilitates the movement of a BoNT light chain across a membrane into the cytoplasm of a cell. Non-limiting examples of a Hn include a BoNT/A H_{N}, a BoNT/B H_{N}, a BoNT/Cl H_{N}, a BoNT/D H_{N}, a BoNT/E H_{N}, a BoNT/F H_{N}, and a BoNT/G H_{N}.

[0080] As used herein, the term “Clostridial Botulinum neurotoxin (BoNT) receptor-binding domain” is synonymous with “H_{C} domain” and “H_{C}”, and means any naturally occurring BoNT receptor binding domain that can execute the cell binding step of the intoxication process, including, e.g., the binding of the BoNT to a BoNT-specific receptor system located on the plasma membrane surface of a target cell. Some aspects of present disclosure relate to modified BoNT receptor binding domains from serotype A (BoNT/A), that enhances the binding of the BoNT/A to a cell, e.g., neurons or a BoNT/A receptor. BoNT/A has eight subtypes, BoNT/A1, BoNT/A2, BoNT/A3, BoNT/A4, BoNT/A5, BoNT/A6, BoNT/A7, and BoNT/A8. Thus, the present disclosure encompasses modified BoNT/A receptor binding domain from all and any of the eight subtypes. It is appreciated that when “BoNT/A” is referred to, it encompasses all the subtypes of BoNT/A. In some embodiments, a “modified BoNT/A receptor binding domain” comprises novel amino acid substitution mutations described in the present disclosure.

[0081] Some aspects of present disclosure relate to modified BoNT receptor binding domains from serotype A1 (BoNT/A1), that enhances the binding of the BoNT/A1 to a cell, e.g., neurons or a BoNT/A1 receptor. Thus, the present disclosure encompasses modified BoNT/A1 receptor binding domain from all and any of the eight subtypes. In some embodiments, a “modified BoNT/A1 receptor binding domain” comprises novel amino acid substitution mutations described in the present disclosure. In some embodiments, the modified receptor binding domain of BoNT/A1 comprises about amino acids 873-1296 of SEQ ID NO: 1. It is to be understood that the border of the BoNT/A1 receptor binding domain fragment may vary by 1-10 amino acids. For example, the modified BoNT/A1 receptor binding domain that may be used for the chimeric toxin may comprise amino acids 863-1296, 864-1296, 865-1296, 866-1296, 867-1296, 868-1296, 869-1296, 870-1296, 871-1296, 872-1296, 873-1296, 874-1296, 875-1296, 876-1296, 877-1296, 878-1296, 879-1296, 880-1296, 881-1296, 882-1296, 883-1296 of SEQ ID NO: 1.

[0082] Some aspects of present disclosure relate to modified BoNT receptor binding domains from serotype A2 (BoNT/A2), that enhances the binding of the BoNT/A2 to a cell, e.g., neurons or a BoNT/A2 receptor. Thus, the present disclosure encompasses modified BoNT/A2 receptor binding domain from all and any of the eight subtypes. In some embodiments, a “modified BoNT/A2 receptor binding domain” comprises novel amino acid substitution mutations described in the present disclosure. In some embodiments, the modified receptor binding domain of BoNT/A2 comprises about amino acids 873-1296 of SEQ ID NO: 2. It is to be understood that the border of the BoNT/A2 receptor binding domain fragment may vary by 1-10 amino acids. For example, the modified BoNT/A2 receptor binding domain that may be used for the chimeric toxin may comprise amino acids 863-1296, 864-1296, 865-1296, 866-1296, 867-1296, 868-1296, 869-1296, 870-1296, 871-1296, 872-1296, 873-1296, 874-1296, 875-1296, 876-1296, 877-1296, 878-1296, 879-1296, 880-1296, 881-1296, 882-1296, 883-1296 of SEQ ID NO: 2.

[0083] In some aspects, the modified BoNT polypeptide is a chimeric toxin, wherein protease domain and translocation domain are from a serotype selected from the group consisting of A, B, C, D, E, F, G, X or En and combinations thereof and the modified receptor binding domain comprises any one of the BoNT/A1 or BoNT/A2 modified receptor binding domains described herein. In some embodiments the protease and translocation domains may be fused with any one of the modified receptor binding domains of BoNT/A1 or BoNT/A2. In a non-limiting example, a chimeric BoNT/B|A1-F917R (nomenclature: protease and transmembrane domain from BoNT/B and modified receptor binding from BoNT/A1 with a F917R modification) may be produced by fusing the protease and transmembrane domain of a BoNT of serotype B with a modified receptor binding domain of BoNT/A1 comprising a phenylalanine to arginine mutation at position 917 of SEQ ID NO: 1. In a non-limiting example, a chimeric BoNT/C|A2-K915Q may be produced by fusing the protease and transmembrane domain of a BoNT of serotype C with a modified receptor binding domain of BoNT/A2 comprising a lysine to glutamine mutation at position 915 of SEQ ID NO: 2.

[0084] In some embodiments, the modified BoNT polypeptide is a chimeric toxin, wherein protease domain and translocation domain comprise the BoNT/B serotype. The protease and transmembrane domain of BoNT/B comprises about amino acids 1-857 of SEQ ID NO: 97. It is to be understood that the border of the BoNT/B protease and transmembrane domain may vary by 1-10 amino acids. For example, the BoNT/B protease and transmembrane domain that may be used for the chimeric toxin may comprise amino acids 1-847, 1-848, 1-849, 1-850, 1-851, 1-852, 1-853, 1-854, 1-855, 1-856, 1-857, 1-858, 1-859, 1-860, 1-861, 1-862, 1-863, 1-864, 1-865, 1-866, or 1-867 of SEQ ID NO: 97.

[0085] In some embodiments, the modified BoNT polypeptide is a chimeric toxin, wherein protease domain and translocation domain comprise the BoNT/C serotype. The protease and transmembrane domain of BoNT/C comprises about amino acids 1-870 of SEQ ID NO: 98. It is to be understood that the border of the BoNT/C protease and transmembrane domain may vary by 1-10 amino acids. For example, the BoNT/C protease and transmembrane domain that may be used for the chimeric toxin may comprise amino acids 1-860, 1-861, 1-862, 1-863, 1-864, 1-865, 1-866, 1-867, 1-868, 1-869, 1-870, 1-871, 1-872, 1-873, 1-874, 1-875, 1-876, 1-877, 1-878, 1-879, or 1-880 of SEQ ID NO: 98.

[0086] In some embodiments, the modified BoNT polypeptide is a chimeric toxin, wherein protease domain and translocation domain comprise the BoNT/D serotype. The protease and transmembrane domain of BoNT/D comprises about amino acids 1-862 of SEQ ID NO: 99. It is to be understood that the border of the BoNT/D protease and transmembrane domain may vary by 1-10 amino acids. For example, the BoNT/D protease and transmembrane domain that may be used for the chimeric toxin may comprise amino acids 1-852, 1-853, 1-854, 1-855, 1-856, 1-857, 1-858, 1-859, 1-860, 1-861, 1-862, 1-863, 1-864, 1-865, 1-866, 1-867, 1-868, 1-869, 1-870, 1-871, 1-872 of SEQ ID NO: 99.

[0087] In some embodiments, the modified BoNT polypeptide is a chimeric toxin, wherein protease domain and translocation domain comprise the BoNT/E serotype. The protease and transmembrane domain of BoNT/E comprises about amino acids 1-844 of SEQ ID NO: 100. It is to be understood that the border of the BoNT/E protease and transmembrane domain may vary by 1-10 amino acids. For example, the BoNT/E protease and transmembrane domain that may be used for the chimeric toxin may comprise amino acids 1-834, 1-835, 1-836, 1-837, 1-838, 1-839, 1-840, 1-841, 1-842, 1-843, 1-844, 1-845, 1-846, 1-847, 1-848, 1-849, 1-850, 1-851, 1-852, 1-853, 1-854 of SEQ ID NO: 100.

[0088] In some embodiments, the modified BoNT polypeptide is a chimeric toxin, wherein protease domain and translocation domain comprise the BoNT/F serotype. The protease and transmembrane domain of BoNT/F comprises about amino acids 1-863 of SEQ ID NO: 101. It is to be understood that the border of the BoNT/F protease and transmembrane domain may vary by 1-10 amino acids. For example, the BoNT/F protease and transmembrane domain that may be used for the chimeric toxin may comprise amino acids 1-853, 1-854, 1-855, 1-856, 1-857, 1-858, 1-859, 1-860, 1-861, 1-862, 1-863, 1-864, 1-865, 1-866, 1-867, 1-868, 1-869, 1-870, 1-871, 1-872, or 1-873 of SEQ ID NO: 101.

[0089] In some embodiments, the modified BoNT polypeptide is a chimeric toxin, wherein protease domain and translocation domain comprise the BoNT/G serotype. The protease and transmembrane domain of BoNT/G comprises about amino acids 1-862 of SEQ ID NO: 105. It is to be understood that the border of the BoNT/G protease and transmembrane domain may vary by 1-10 amino acids. For example, the BoNT/G protease and transmembrane domain that may be used for the chimeric toxin may comprise amino acids 1-852, 1-853, 1-854, 1-855, 1-856, 1-857, 1-858, 1-859, 1-860, 1-861, 1-862, 1-863, 1-864, 1-865, 1-866, 1-867, 1-868, 1-869, 1-870, 1-871, or 1-872 of SEQ ID NO: 105.

[0090] In some embodiments, the modified BoNT polypeptide is a chimeric toxin, wherein protease domain and translocation domain comprise the BoNT/H serotype. The protease and transmembrane domain of BoNT/H comprises about amino acids 1-858 of SEQ ID NO: 102. It is to be understood that the border of the BoNT/H protease and transmembrane domain may vary by 1-10 amino acids. For example, the BoNT/H protease and transmembrane domain that may be used for the chimeric toxin may comprise amino acids 1-848, 1-849, 1-850, 1-851, 1-852, 1-853, 1-854, 1-855, 1-856, 1-857, 1-858, 1-859, 1-860, 1-861, 1-862, 1-863, 1-864, 1-865, 1-866, 1-867 or 1-868 of SEQ ID NO: 102.

[0091] In some embodiments, the modified BoNT polypeptide is a chimeric toxin, wherein protease domain and translocation domain comprise the BoNT/X serotype as described in U.S. application Ser. No. 16/315,698 (incorporated herein by reference). The protease and transmembrane domain of BoNT/X comprises about amino acids 1-889 of SEQ ID NO: 103. It is to be understood that the border of the BoNT/X protease and transmembrane domain may vary by 1-10 amino acids. For example, the BoNT/X protease and transmembrane domain that may be used for the chimeric toxin may comprise amino acids 1-879, 1-880, 1-881, 1-882, 1-883, 1-884, 1-885, 1-886, 1-887, 1-888, 1-889, 1-890, 1-891, 1-892, 1-893, 1-894, 1-895, 1-896, 1-897, 1-898 or 1-899 of SEQ ID NO: 103.

[0092] In some embodiments, the modified BoNT polypeptide is a chimeric toxin, wherein protease domain and translocation domain comprise the BoNT/EN serotype as described in U.S. application Ser. No. 16/651,720 (incorporated herein by reference). The protease and transmembrane domain of BoNT/EN comprises about amino acids 1-874 of SEQ ID NO: 104. It is to be understood that the border of the BoNT/EN protease and transmembrane domain may vary by 1-10 amino acids. For example, the BoNT/EN protease and transmembrane domain that may be used for the chimeric toxin may comprise amino acids 1-864, 1-865, 1-866, 1-867, 1-868, 1-869, 1-870, 1-871, 1-872, 1-873, 1-874, 1-875, 1-876, 1-877, 1-878, 1-879, 1-880, 1-881, 1-882, 1-883 or 1-884 of SEQ ID NO: 104.

[0093] Some aspects of the present disclosure provide modified Clostridial Botulinum neurotoxin (BoNT) polypeptides comprising a modified receptor binding domain of Clostridial Botulinum serotype A1 (BoNT/A1). In some embodiments, the modified receptor binding domain of BoNT/A1 comprises one or more amino acid substitutions at positions corresponding to 917, 953, 954, 955, 957, 968, 1025, 1026, 1052, 1062, 1063, 1064, 1065, 1066, 1145, 1156, 1232, 1272, 1278, 1288, 1289, 1292, 1294, and 1295 in SEQ ID NO: 1. In some embodiments, the modified receptor binding domain of BoNT/A1 comprises one or more amino acid substitutions at positions corresponding to 954, 955, 957, 1063, 1064, 1025, 1026, 1156, 1232, 1278, 1294, and 1295 in SEQ ID NO: 1.

[0094] In some embodiments, the modified receptor binding domain comprises an amino acid substitution at a position corresponding to 917 in SEQ ID NO: 1. In some embodiments, the modified receptor binding domain comprises an amino acid substitution corresponding to F917R or F917K in SEQ ID NO: 1.

[0095] In some embodiments, the modified BoNT polypeptide is a modified receptor binding domain of BoNT/A1 described herein. In some embodiments, the modified BoNT polypeptide comprises an amino acid sequence that is at least 70% (e.g., at least 70%, at least 75%, at least 80%, at least 85%, at least 90%, at least 95%, or at least 99%) identical to SEQ ID NO: 49, and comprises an amino acid substitution corresponding to F917R or F917K in SEQ ID NO: 49. In some embodiments, the modified BoNT polypeptide comprises the amino acid sequence of SEQ ID NO: 51 or SEQ ID NO: 52, In some embodiments, the modified BoNT polypeptide consists of the amino acid sequence of SEQ ID NO: 51 or SEQ ID NO: 52.

[0096] In some embodiments, the modified BoNT polypeptide is a full-length BoNT/A1 polypeptide comprising the modified receptor binding domain of BoNT/A1 described herein. In some embodiments, the modified BoNT polypeptide comprises an amino acid sequence that is at least 70% (e.g., at least 70%, at least 75%, at least 80%, at least 85%, at least 90%, at least 95%, or at least 99%) identical to SEQ ID NO: 1, and comprises an amino acid substitution corresponding to F917R or F917K in SEQ ID NO: 1. In some embodiments, the modified BoNT polypeptide comprises the amino acid sequence of SEQ ID NO: 3 or SEQ ID NO: 4. In some embodiments, the modified BoNT polypeptide consists of the amino acid sequence of SEQ ID NO: 3 or SEQ ID NO: 4.

[0097] In some embodiments, the modified BoNT polypeptide is a chimeric BoNT polypeptide comprising the modified receptor binding of BoNT/A1 described herein, and a protease domain and translocation domain from a BoNT of a different serotype (e.g., BoNT/B, C, D, E, F, G, H, X, or EN). In some embodiments, the modified BoNT polypeptide comprises a polypeptide comprising an amino acid sequence that is at least 70% (e.g., at least 70%, at least 75%, at least 80%, at least 85%, at least 90%, at least 95%, or at least 99%) identical to any one of SEQ ID NOs: 97-105, fused to a modified receptor bonding domain of BoNT/A1 comprising an amino acid substitution corresponding to F917R or F917K in SEQ ID NO: 1. In some embodiments, the modified BoNT polypeptide comprises a polypeptide comprising an amino acid sequence that is at least 70% (e.g., at least 70%, at least 75%, at least 80%, at least 85%, at least 90%, at least 95%, or at least 99%) identical to any one of SEQ ID NOs: 97-105, fused to a modified receptor bonding domain of BoNT/A1 comprising an amino acid sequence that is at least 70% (e.g., at least 70%, at least 75%, at least 80%, at least 85%, at least 90%, at least 95%, or at least 99%) identical to SEQ ID NO: 49 and comprises an amino acid substitution corresponding to F917R or F917K in SEQ ID NO: 1. In some embodiments, the modified BoNT polypeptide comprises a polypeptide comprising the amino acid sequence of any one of SEQ ID NOs: 97-105, fused to a modified receptor bonding domain of BoNT/A1 comprising the amino acid sequence of SEQ ID NO: 51 or SEQ ID NO: 52. In some embodiments, the modified BoNT polypeptide comprises a polypeptide consisting of the amino acid sequence of any one of SEQ ID NOs: 97-105, fused to a modified receptor bonding domain of BoNT/A1 consisting of the amino acid sequence of SEQ ID NO: 51 or SEQ ID NO: 52. In some embodiments, the modified BoNT polypeptide comprises the amino acid sequence of any one of SEQ ID NOs: 105-113 having an amino acid substitution corresponding to F917R or F917K in SEQ ID NO: 1.

[0098] In some embodiments, the modified receptor binding domain comprises an amino acid substitution at a position corresponding to 953 in SEQ ID NO: 1. In some embodiments, the modified receptor binding domain comprises an amino acid substitution corresponding to F953H or F953Y in SEQ ID NO: 1.

[0099] In some embodiments, the modified BoNT polypeptide is a modified receptor binding domain of BoNT/A1 described herein. In some embodiments, the modified BoNT polypeptide comprises an amino acid sequence that is at least 70% (e.g., at least 70%, at least 75%, at least 80%, at least 85%, at least 90%, at least 95%, or at least 99%) identical to SEQ ID NO: 49, and comprises an amino acid substitution corresponding to F953H or F953Y in SEQ ID NO: 49. In some embodiments, the modified BoNT polypeptide comprises the amino acid sequence of SEQ ID NO: 53 or SEQ ID NO: 54, In some embodiments, the modified BoNT polypeptide consists of the amino acid sequence of SEQ ID NO: 53 or SEQ ID NO: 54.

[0100] In some embodiments, the modified BoNT polypeptide is a full-length BoNT/A1 polypeptide comprising the modified receptor binding domain of BoNT/A1 described herein. In some embodiments, the modified BoNT polypeptide comprises an amino acid sequence that is at least 70% (e.g., at least 70%, at least 75%, at least 80%, at least 85%, at least 90%, at least 95%, or at least 99%) identical to SEQ ID NO: 1, and comprises an amino acid substitution corresponding to F953H or F953Y in SEQ ID NO: 1. In some embodiments, the modified BoNT polypeptide comprises the amino acid sequence of SEQ ID NO: 5 or SEQ ID NO: 6. In some embodiments, the modified BoNT polypeptide consists of the amino acid sequence of SEQ ID NO: 5 or SEQ ID NO: 6.

[0101] In some embodiments, the modified BoNT polypeptide is a chimeric BoNT polypeptide comprising the modified receptor binding of BoNT/A1 described herein, and a protease domain and translocation domain from a BoNT of a different serotype (e.g., BoNT/B, C, D, E, F, G, H, X, or EN). In some embodiments, the modified BoNT polypeptide comprises a polypeptide comprising an amino acid sequence that is at least 70% (e.g., at least 70%, at least 75%, at least 80%, at least 85%, at least 90%, at least 95%, or at least 99%) identical to any one of SEQ ID NOs: 97-105, fused to a modified receptor bonding domain of BoNT/A1 comprising an amino acid substitution corresponding to F953H or F953Y in SEQ ID NO: 1. In some embodiments, the modified BoNT polypeptide comprises a polypeptide comprising an amino acid sequence that is at least 70% (e.g., at least 70%, at least 75%, at least 80%, at least 85%, at least 90%, at least 95%, or at least 99%) identical to any one of SEQ ID NOs: 97-105, fused to a modified receptor bonding domain of BoNT/A1 comprising an amino acid sequence that is at least 70% (e.g., at least 70%, at least 75%, at least 80%, at least 85%, at least 90%, at least 95%, or at least 99%) identical to SEQ ID NO: 49 and comprises an amino acid substitution corresponding to F953H or F953Y in SEQ ID NO: 1. In some embodiments, the modified BoNT polypeptide comprises a polypeptide comprising the amino acid sequence of any one of SEQ ID NOs: 97-105, fused to a modified receptor bonding domain of BoNT/A1 comprising the amino acid sequence of SEQ ID NO: 53 or SEQ ID NO: 54. In some embodiments, the modified BoNT polypeptide comprises a polypeptide consisting of the amino acid sequence of any one of SEQ ID NOs: 97-105, fused to a modified receptor bonding domain of BoNT/A1 consisting of the amino acid sequence of SEQ ID NO: 53 or SEQ ID NO: 54. In some embodiments, the modified BoNT polypeptide comprises the amino acid sequence of any one of SEQ ID NOs: 105-113 having an amino acid substitution corresponding to F953H or F953Y in SEQ ID NO: 1.

[0102] In some embodiments, the modified receptor binding domain comprises an amino acid substitution at a position corresponding to 954 in SEQ ID NO: 1. In some embodiments, the modified receptor binding domain comprises an amino acid substitution corresponding to N954S in SEQ ID NO: 1.

[0103] In some embodiments, the modified BoNT polypeptide is a modified receptor binding domain of BoNT/A1 described herein. In some embodiments, the modified BoNT polypeptide comprises an amino acid sequence that is at least 70% (e.g., at least 70%, at least 75%, at least 80%, at least 85%, at least 90%, at least 95%, or at least 99%) identical to SEQ ID NO: 49, and comprises an amino acid substitution corresponding to N954S in SEQ ID NO: 49. In some embodiments, the modified BoNT polypeptide comprises the amino acid sequence of SEQ ID NO: 55, In some embodiments, the modified BoNT polypeptide consists of the amino acid sequence of SEQ ID NO: 55.

[0104] In some embodiments, the modified BoNT polypeptide is a full-length BoNT/A1 polypeptide comprising the modified receptor binding domain of BoNT/A1 described herein. In some embodiments, the modified BoNT polypeptide comprises an amino acid sequence that is at least 70% (e.g., at least 70%, at least 75%, at least 80%, at least 85%, at least 90%, at least 95%, or at least 99%) identical to SEQ ID NO: 1, and comprises an amino acid substitution corresponding to N954S in SEQ ID NO: 1. In some embodiments, the modified BoNT polypeptide comprises the amino acid sequence of SEQ ID NO: 7. In some embodiments, the modified BoNT polypeptide consists of the amino acid sequence of SEQ ID NO: 7.

[0105] In some embodiments, the modified BoNT polypeptide is a chimeric BoNT polypeptide comprising the modified receptor binding of BoNT/A1 described herein, and a protease domain and translocation domain from a BoNT of a different serotype (e.g., BoNT/B, C, D, E, F, G, H, X, or EN). In some embodiments, the modified BoNT polypeptide comprises a polypeptide comprising an amino acid sequence that is at least 70% (e.g., at least 70%, at least 75%, at least 80%, at least 85%, at least 90%, at least 95%, or at least 99%) identical to any one of SEQ ID NOs: 97-105, fused to a modified receptor bonding domain of BoNT/A1 comprising an amino acid substitution corresponding to N954S in SEQ ID NO: 1. In some embodiments, the modified BoNT polypeptide comprises a polypeptide comprising an amino acid sequence that is at least 70% (e.g., at least 70%, at least 75%, at least 80%, at least 85%, at least 90%, at least 95%, or at least 99%) identical to any one of SEQ ID NOs: 97-105, fused to a modified receptor bonding domain of BoNT/A1 comprising an amino acid sequence that is at least 70% (e.g., at least 70%, at least 75%, at least 80%, at least 85%, at least 90%, at least 95%, or at least 99%) identical to SEQ ID NO: 49 and comprises an amino acid substitution corresponding to N954S in SEQ ID NO: 1. In some embodiments, the modified BoNT polypeptide comprises a polypeptide comprising the amino acid sequence of any one of SEQ ID NOs: 97-105, fused to a modified receptor bonding domain of BoNT/A1 comprising the amino acid sequence of SEQ ID NO: 55. In some embodiments, the modified BoNT polypeptide comprises a polypeptide consisting of the amino acid sequence of any one of SEQ ID NOs: 97-105, fused to a modified receptor bonding domain of BoNT/A1 consisting of the amino acid sequence of SEQ ID NO: 55. In some embodiments, the modified BoNT polypeptide comprises the amino acid sequence of any one of SEQ ID NOs: 105-113 having an amino acid substitution corresponding to N954S in SEQ ID NO: 1.

[0106] In some embodiments, the modified receptor binding domain comprises an amino acid substitution at a position corresponding to 955 in SEQ ID NO: 1. In some embodiments, the modified receptor binding domain comprises an amino acid substitution corresponding to S955K in SEQ ID NO: 1.

[0107] In some embodiments, the modified BoNT polypeptide is a modified receptor binding domain of BoNT/A1 described herein. In some embodiments, the modified BoNT polypeptide comprises an amino acid sequence that is at least 70% (e.g., at least 70%, at least 75%, at least 80%, at least 85%, at least 90%, at least 95%, or at least 99%) identical to SEQ ID NO: 49, and comprises an amino acid substitution corresponding to S955K in SEQ ID NO: 49. In some embodiments, the modified BoNT polypeptide comprises the amino acid sequence of SEQ ID NO: 56, In some embodiments, the modified BoNT polypeptide consists of the amino acid sequence of SEQ ID NO: 56.

[0108] In some embodiments, the modified BoNT polypeptide is a full-length BoNT/A1 polypeptide comprising the modified receptor binding domain of BoNT/A1 described herein. In some embodiments, the modified BoNT polypeptide comprises an amino acid sequence that is at least 70% (e.g., at least 70%, at least 75%, at least 80%, at least 85%, at least 90%, at least 95%, or at least 99%) identical to SEQ ID NO: 1, and comprises an amino acid substitution corresponding to S955K in SEQ ID NO: 1. In some embodiments, the modified BoNT polypeptide comprises the amino acid sequence of SEQ ID NO: 8. In some embodiments, the modified BoNT polypeptide consists of the amino acid sequence of SEQ ID NO: 8.

[0109] In some embodiments, the modified BoNT polypeptide is a chimeric BoNT polypeptide comprising the modified receptor binding of BoNT/A1 described herein, and a protease domain and translocation domain from a BoNT of a different serotype (e.g., BoNT/B, C, D, E, F, G, H, X, or EN). In some embodiments, the modified BoNT polypeptide comprises a polypeptide comprising an amino acid sequence that is at least 70% (e.g., at least 70%, at least 75%, at least 80%, at least 85%, at least 90%, at least 95%, or at least 99%) identical to any one of SEQ ID NOs: 97-105, fused to a modified receptor bonding domain of BoNT/A1 comprising an amino acid substitution corresponding to S955K in SEQ ID NO: 1. In some embodiments, the modified BoNT polypeptide comprises a polypeptide comprising an amino acid sequence that is at least 70% (e.g., at least 70%, at least 75%, at least 80%, at least 85%, at least 90%, at least 95%, or at least 99%) identical to any one of SEQ ID NOs: 97-105, fused to a modified receptor bonding domain of BoNT/A1 comprising an amino acid sequence that is at least 70% (e.g., at least 70%, at least 75%, at least 80%, at least 85%, at least 90%, at least 95%, or at least 99%) identical to SEQ ID NO: 49 and comprises an amino acid substitution corresponding to S955K in SEQ ID NO: 1. In some embodiments, the modified BoNT polypeptide comprises a polypeptide comprising the amino acid sequence of any one of SEQ ID NOs: 97-105, fused to a modified receptor bonding domain of BoNT/A1 comprising the amino acid sequence of SEQ ID NO: 56. In some embodiments, the modified BoNT polypeptide comprises a polypeptide consisting of the amino acid sequence of any one of SEQ ID NOs: 97-105, fused to a modified receptor bonding domain of BoNT/A1 consisting of the amino acid sequence of SEQ ID NO: 56. In some embodiments, the modified BoNT polypeptide comprises the amino acid sequence of any one of SEQ ID NOs: 105-113 having an amino acid substitution corresponding to S955K in SEQ ID NO: 1.

[0110] In some embodiments, the modified receptor binding domain comprises an amino acid substitution at a position corresponding to 957 in SEQ ID NO: 1. In some embodiments, the modified receptor binding domain comprises an amino acid substitution corresponding to S957N in SEQ ID NO: 1.

[0111] In some embodiments, the modified BoNT polypeptide is a modified receptor binding domain of BoNT/A1 described herein. In some embodiments, the modified BoNT polypeptide comprises an amino acid sequence that is at least 70% (e.g., at least 70%, at least 75%, at least 80%, at least 85%, at least 90%, at least 95%, or at least 99%) identical to SEQ ID NO: 49, and comprises an amino acid substitution corresponding to S957N in SEQ ID NO: 49. In some embodiments, the modified BoNT polypeptide comprises the amino acid sequence of SEQ ID NO: 57, In some embodiments, the modified BoNT polypeptide consists of the amino acid sequence of SEQ ID NO: 57.

[0112] In some embodiments, the modified BoNT polypeptide is a full-length BoNT/A1 polypeptide comprising the modified receptor binding domain of BoNT/A1 described herein. In some embodiments, the modified BoNT polypeptide comprises an amino acid sequence that is at least 70% (e.g., at least 70%, at least 75%, at least 80%, at least 85%, at least 90%, at least 95%, or at least 99%) identical to SEQ ID NO: 1, and comprises an amino acid substitution corresponding to S957N in SEQ ID NO: 1. In some embodiments, the modified BoNT polypeptide comprises the amino acid sequence of SEQ ID NO: 9. In some embodiments, the modified BoNT polypeptide consists of the amino acid sequence of SEQ ID NO: 9.

[0113] In some embodiments, the modified BoNT polypeptide is a chimeric BoNT polypeptide comprising the modified receptor binding of BoNT/A1 described herein, and a protease domain and translocation domain from a BoNT of a different serotype (e.g., BoNT/B, C, D, E, F, G, H, X, or EN). In some embodiments, the modified BoNT polypeptide comprises a polypeptide comprising an amino acid sequence that is at least 70% (e.g., at least 70%, at least 75%, at least 80%, at least 85%, at least 90%, at least 95%, or at least 99%) identical to any one of SEQ ID NOs: 97-105, fused to a modified receptor bonding domain of BoNT/A1 comprising an amino acid substitution corresponding to S957N in SEQ ID NO: 1. In some embodiments, the modified BoNT polypeptide comprises a polypeptide comprising an amino acid sequence that is at least 70% (e.g., at least 70%, at least 75%, at least 80%, at least 85%, at least 90%, at least 95%, or at least 99%) identical to any one of SEQ ID NOs: 97-105, fused to a modified receptor bonding domain of BoNT/A1 comprising an amino acid sequence that is at least 70% (e.g., at least 70%, at least 75%, at least 80%, at least 85%, at least 90%, at least 95%, or at least 99%) identical to SEQ ID NO: 49 and comprises an amino acid substitution corresponding to S957N in SEQ ID NO: 1. In some embodiments, the modified BoNT polypeptide comprises a polypeptide comprising the amino acid sequence of any one of SEQ ID NOs: 97-105, fused to a modified receptor bonding domain of BoNT/A1 comprising the amino acid sequence of SEQ ID NO: 57. In some embodiments, the modified BoNT polypeptide comprises a polypeptide consisting of the amino acid sequence of any one of SEQ ID NOs: 97-105, fused to a modified receptor bonding domain of BoNT/A1 consisting of the amino acid sequence of SEQ ID NO: 57. In some embodiments, the modified BoNT polypeptide comprises the amino acid sequence of any one of SEQ ID NOs: 105-113 having an amino acid substitution corresponding S957N in SEQ ID NO: 1.

[0114] In some embodiments, the modified receptor binding domain comprises an amino acid substitution at a position corresponding to 968 in SEQ ID NO: 1. In some embodiments, the modified receptor binding domain comprises an amino acid substitution corresponding to M968I in SEQ ID NO: 1.

[0115] In some embodiments, the modified BoNT polypeptide is a modified receptor binding domain of BoNT/A1 described herein. In some embodiments, the modified BoNT polypeptide comprises an amino acid sequence that is at least 70% (e.g., at least 70%, at least 75%, at least 80%, at least 85%, at least 90%, at least 95%, or at least 99%) identical to SEQ ID NO: 49, and comprises an amino acid substitution corresponding to M968I in SEQ ID NO: 49. In some embodiments, the modified BoNT polypeptide comprises the amino acid sequence of SEQ ID NO: 58, In some embodiments, the modified BoNT polypeptide consists of the amino acid sequence of SEQ ID NO: 58.

[0116] In some embodiments, the modified BoNT polypeptide is a full-length BoNT/A1 polypeptide comprising the modified receptor binding domain of BoNT/A1 described herein. In some embodiments, the modified BoNT polypeptide comprises an amino acid sequence that is at least 70% (e.g., at least 70%, at least 75%, at least 80%, at least 85%, at least 90%, at least 95%, or at least 99%) identical to SEQ ID NO: 1, and comprises an amino acid substitution corresponding to M968I in SEQ ID NO: 1. In some embodiments, the modified BoNT polypeptide comprises the amino acid sequence of SEQ ID NO: 10. In some embodiments, the modified BoNT polypeptide consists of the amino acid sequence of SEQ ID NO: 10.

[0117] In some embodiments, the modified BoNT polypeptide is a chimeric BoNT polypeptide comprising the modified receptor binding of BoNT/A1 described herein, and a protease domain and translocation domain from a BoNT of a different serotype (e.g., BoNT/B, C, D, E, F, G, H, X, or EN). In some embodiments, the modified BoNT polypeptide comprises a polypeptide comprising an amino acid sequence that is at least 70% (e.g., at least 70%, at least 75%, at least 80%, at least 85%, at least 90%, at least 95%, or at least 99%) identical to any one of SEQ ID NOs: 97-105, fused to a modified receptor bonding domain of BoNT/A1 comprising an amino acid substitution corresponding to M968I in SEQ ID NO: 1. In some embodiments, the modified BoNT polypeptide comprises a polypeptide comprising an amino acid sequence that is at least 70% (e.g., at least 70%, at least 75%, at least 80%, at least 85%, at least 90%, at least 95%, or at least 99%) identical to any one of SEQ ID NOs: 97-105, fused to a modified receptor bonding domain of BoNT/A1 comprising an amino acid sequence that is at least 70% (e.g., at least 70%, at least 75%, at least 80%, at least 85%, at least 90%, at least 95%, or at least 99%) identical to SEQ ID NO: 49 and comprises an amino acid substitution corresponding to M968I in SEQ ID NO: 1. In some embodiments, the modified BoNT polypeptide comprises a polypeptide comprising the amino acid sequence of any one of SEQ ID NOs: 97-105, fused to a modified receptor bonding domain of BoNT/A1 comprising the amino acid sequence of SEQ ID NO: 58. In some embodiments, the modified BoNT polypeptide comprises a polypeptide consisting of the amino acid sequence of any one of SEQ ID NOs: 97-105, fused to a modified receptor bonding domain of BoNT/A1 consisting of the amino acid sequence of SEQ ID NO: 58. In some embodiments, the modified BoNT polypeptide comprises the amino acid sequence of any one of SEQ ID NOs: 105-113 having an amino acid substitution corresponding to M968I in SEQ ID NO: 1.

[0118] In some embodiments, the modified receptor binding domain comprises an amino acid substitution at a position corresponding to 1025 in SEQ ID NO: 1. In some embodiments, the modified receptor binding domain comprises an amino acid substitution corresponding to N1025T in SEQ ID NO: 1.

[0119] In some embodiments, the modified BoNT polypeptide is a modified receptor binding domain of BoNT/A1 described herein. In some embodiments, the modified BoNT polypeptide comprises an amino acid sequence that is at least 70% (e.g., at least 70%, at least 75%, at least 80%, at least 85%, at least 90%, at least 95%, or at least 99%) identical to SEQ ID NO: 49, and comprises an amino acid substitution corresponding to N1025T in SEQ ID NO: 49. In some embodiments, the modified BoNT polypeptide comprises the amino acid sequence of SEQ ID NO: 59, In some embodiments, the modified BoNT polypeptide consists of the amino acid sequence of SEQ ID NO: 59.

[0120] In some embodiments, the modified BoNT polypeptide is a full-length BoNT/A1 polypeptide comprising the modified receptor binding domain of BoNT/A1 described herein. In some embodiments, the modified BoNT polypeptide comprises an amino acid sequence that is at least 70% (e.g., at least 70%, at least 75%, at least 80%, at least 85%, at least 90%, at least 95%, or at least 99%) identical to SEQ ID NO: 1, and comprises an amino acid substitution corresponding to N1025T in SEQ ID NO: 1. In some embodiments, the modified BoNT polypeptide comprises the amino acid sequence of SEQ ID NO: 11. In some embodiments, the modified BoNT polypeptide consists of the amino acid sequence of SEQ ID NO: 11.

[0121] In some embodiments, the modified BoNT polypeptide is a chimeric BoNT polypeptide comprising the modified receptor binding of BoNT/A1 described herein, and a protease domain and translocation domain from a BoNT of a different serotype (e.g., BoNT/B, C, D, E, F, G, H, X, or EN). In some embodiments, the modified BoNT polypeptide comprises a polypeptide comprising an amino acid sequence that is at least 70% (e.g., at least 70%, at least 75%, at least 80%, at least 85%, at least 90%, at least 95%, or at least 99%) identical to any one of SEQ ID NOs: 97-105, fused to a modified receptor bonding domain of BoNT/A1 comprising an amino acid substitution corresponding to N1025T in SEQ ID NO: 1. In some embodiments, the modified BoNT polypeptide comprises a polypeptide comprising an amino acid sequence that is at least 70% (e.g., at least 70%, at least 75%, at least 80%, at least 85%, at least 90%, at least 95%, or at least 99%) identical to any one of SEQ ID NOs: 97-105, fused to a modified receptor bonding domain of BoNT/A1 comprising an amino acid sequence that is at least 70% (e.g., at least 70%, at least 75%, at least 80%, at least 85%, at least 90%, at least 95%, or at least 99%) identical to SEQ ID NO: 49 and comprises an amino acid substitution corresponding to N1025T in SEQ ID NO: 1. In some embodiments, the modified BoNT polypeptide comprises a polypeptide comprising the amino acid sequence of any one of SEQ ID NOs: 97-105, fused to a modified receptor bonding domain of BoNT/A1 comprising the amino acid sequence of SEQ ID NO: 59. In some embodiments, the modified BoNT polypeptide comprises a polypeptide consisting of the amino acid sequence of any one of SEQ ID NOs: 97-105, fused to a modified receptor bonding domain of BoNT/A1 consisting of the amino acid sequence of SEQ ID NO: 59. In some embodiments, the modified BoNT polypeptide comprises the amino acid sequence of any one of SEQ ID NOs: 105-113 having an amino acid substitution corresponding to N1025T in SEQ ID NO: 1.

[0122] In some embodiments, the modified receptor binding domain comprises an amino acid substitution at a position corresponding to 1026 in SEQ ID NO: 1. In some embodiments, the modified receptor binding domain comprises an amino acid substitution corresponding to N1026K in SEQ ID NO: 1.

[0123] In some embodiments, the modified BoNT polypeptide is a modified receptor binding domain of BoNT/A1 described herein. In some embodiments, the modified BoNT polypeptide comprises an amino acid sequence that is at least 70% (e.g., at least 70%, at least 75%, at least 80%, at least 85%, at least 90%, at least 95%, or at least 99%) identical to SEQ ID NO: 49, and comprises an amino acid substitution corresponding to N1026K in SEQ ID NO: 49. In some embodiments, the modified BoNT polypeptide comprises the amino acid sequence of SEQ ID NO: 60, In some embodiments, the modified BoNT polypeptide consists of the amino acid sequence of SEQ ID NO: 60.

[0124] In some embodiments, the modified BoNT polypeptide is a full-length BoNT/A1 polypeptide comprising the modified receptor binding domain of BoNT/A1 described herein. In some embodiments, the modified BoNT polypeptide comprises an amino acid sequence that is at least 70% (e.g., at least 70%, at least 75%, at least 80%, at least 85%, at least 90%, at least 95%, or at least 99%) identical to SEQ ID NO: 1, and comprises an amino acid substitution corresponding to N1026K in SEQ ID NO: 1. In some embodiments, the modified BoNT polypeptide comprises the amino acid sequence of SEQ ID NO: 12. In some embodiments, the modified BoNT polypeptide consists of the amino acid sequence of SEQ ID NO: 12.

[0125] In some embodiments, the modified BoNT polypeptide is a chimeric BoNT polypeptide comprising the modified receptor binding of BoNT/A1 described herein, and a protease domain and translocation domain from a BoNT of a different serotype (e.g., BoNT/B, C, D, E, F, G, H, X, or EN). In some embodiments, the modified BoNT polypeptide comprises a polypeptide comprising an amino acid sequence that is at least 70% (e.g., at least 70%, at least 75%, at least 80%, at least 85%, at least 90%, at least 95%, or at least 99%) identical to any one of SEQ ID NOs: 97-105, fused to a modified receptor bonding domain of BoNT/A1 comprising an amino acid substitution corresponding to N1026K in SEQ ID NO: 1. In some embodiments, the modified BoNT polypeptide comprises a polypeptide comprising an amino acid sequence that is at least 70% (e.g., at least 70%, at least 75%, at least 80%, at least 85%, at least 90%, at least 95%, or at least 99%) identical to any one of SEQ ID NOs: 97-105, fused to a modified receptor bonding domain of BoNT/A1 comprising an amino acid sequence that is at least 70% (e.g., at least 70%, at least 75%, at least 80%, at least 85%, at least 90%, at least 95%, or at least 99%) identical to SEQ ID NO: 49 and comprises an amino acid substitution corresponding to N1026K in SEQ ID NO: 1. In some embodiments, the modified BoNT polypeptide comprises a polypeptide comprising the amino acid sequence of any one of SEQ ID NOs: 97-105, fused to a modified receptor bonding domain of BoNT/A1 comprising the amino acid sequence of SEQ ID NO: 60. In some embodiments, the modified BoNT polypeptide comprises a polypeptide consisting of the amino acid sequence of any one of SEQ ID NOs: 97-105, fused to a modified receptor bonding domain of BoNT/A1 consisting of the amino acid sequence of SEQ ID NO: 60. In some embodiments, the modified BoNT polypeptide comprises the amino acid sequence of any one of SEQ ID NOs: 105-113 having an amino acid substitution corresponding to N1026K in SEQ ID NO: 1.

[0126] In some embodiments, the modified receptor binding domain comprises an amino acid substitution at a position corresponding to 1052 in SEQ ID NO: 1. In some embodiments, the modified receptor binding domain comprises an amino acid substitution corresponding to N1052K in SEQ ID NO: 1.

[0127] In some embodiments, the modified BoNT polypeptide is a modified receptor binding domain of BoNT/A1 described herein. In some embodiments, the modified BoNT polypeptide comprises an amino acid sequence that is at least 70% (e.g., at least 70%, at least 75%, at least 80%, at least 85%, at least 90%, at least 95%, or at least 99%) identical to SEQ ID NO: 49, and comprises an amino acid substitution corresponding to N1052K in SEQ ID NO: 49. In some embodiments, the modified BoNT polypeptide comprises the amino acid sequence of SEQ ID NO: 61. In some embodiments, the modified BoNT polypeptide consists of the amino acid sequence of SEQ ID NO: 61.

[0128] In some embodiments, the modified BoNT polypeptide is a full-length BoNT/A1 polypeptide comprising the modified receptor binding domain of BoNT/A1 described herein. In some embodiments, the modified BoNT polypeptide comprises an amino acid sequence that is at least 70% (e.g., at least 70%, at least 75%, at least 80%, at least 85%, at least 90%, at least 95%, or at least 99%) identical to SEQ ID NO: 1, and comprises an amino acid substitution corresponding to N1052K in SEQ ID NO: 1. In some embodiments, the modified BoNT polypeptide comprises the amino acid sequence of SEQ ID NO: 13. In some embodiments, the modified BoNT polypeptide consists of the amino acid sequence of SEQ ID NO: 13.

[0129] In some embodiments, the modified BoNT polypeptide is a chimeric BoNT polypeptide comprising the modified receptor binding of BoNT/A1 described herein, and a protease domain and translocation domain from a BoNT of a different serotype (e.g., BoNT/B, C, D, E, F, G, H, X, or EN). In some embodiments, the modified BoNT polypeptide comprises a polypeptide comprising an amino acid sequence that is at least 70% (e.g., at least 70%, at least 75%, at least 80%, at least 85%, at least 90%, at least 95%, or at least 99%) identical to any one of SEQ ID NOs: 97-105, fused to a modified receptor bonding domain of BoNT/A1 comprising an amino acid substitution corresponding to N1052K in SEQ ID NO: 1. In some embodiments, the modified BoNT polypeptide comprises a polypeptide comprising an amino acid sequence that is at least 70% (e.g., at least 70%, at least 75%, at least 80%, at least 85%, at least 90%, at least 95%, or at least 99%) identical to any one of SEQ ID NOs: 97-105, fused to a modified receptor bonding domain of BoNT/A1 comprising an amino acid sequence that is at least 70% (e.g., at least 70%, at least 75%, at least 80%, at least 85%, at least 90%, at least 95%, or at least 99%) identical to SEQ ID NO: 49 and comprises an amino acid substitution corresponding to N1052K in SEQ ID NO: 1. In some embodiments, the modified BoNT polypeptide comprises a polypeptide comprising the amino acid sequence of any one of SEQ ID NOs: 97-105, fused to a modified receptor bonding domain of BoNT/A1 comprising the amino acid sequence of SEQ ID NO: 61. In some embodiments, the modified BoNT polypeptide comprises a polypeptide consisting of the amino acid sequence of any one of SEQ ID NOs: 97-105, fused to a modified receptor bonding domain of BoNT/A1 consisting of the amino acid sequence of SEQ ID NO: 61. In some embodiments, the modified BoNT polypeptide comprises the amino acid sequence of any one of SEQ ID NOs: 105-113 having an amino acid substitution corresponding to N1052K in SEQ ID NO: 1.

[0130] In some embodiments, the modified receptor binding domain comprises an amino acid substitution at a position corresponding to 1062 in SEQ ID NO: 1. In some embodiments, the modified receptor binding domain comprises an amino acid substitution corresponding to D1062E in SEQ ID NO: 1.

[0131] In some embodiments, the modified BoNT polypeptide is a modified receptor binding domain of BoNT/A1 described herein. In some embodiments, the modified BoNT polypeptide comprises an amino acid sequence that is at least 70% (e.g., at least 70%, at least 75%, at least 80%, at least 85%, at least 90%, at least 95%, or at least 99%) identical to SEQ ID NO: 49, and comprises an amino acid substitution corresponding to D1062E in SEQ ID NO: 49. In some embodiments, the modified BoNT polypeptide comprises the amino acid sequence of SEQ ID NO: 62. In some embodiments, the modified BoNT polypeptide consists of the amino acid sequence of SEQ ID NO: 62.

[0132] In some embodiments, the modified BoNT polypeptide is a full-length BoNT/A1 polypeptide comprising the modified receptor binding domain of BoNT/A1 described herein. In some embodiments, the modified BoNT polypeptide comprises an amino acid sequence that is at least 70% (e.g., at least 70%, at least 75%, at least 80%, at least 85%, at least 90%, at least 95%, or at least 99%) identical to SEQ ID NO: 1, and comprises an amino acid substitution corresponding to D1062E in SEQ ID NO: 1. In some embodiments, the modified BoNT polypeptide comprises the amino acid sequence of SEQ ID NO: 14. In some embodiments, the modified BoNT polypeptide consists of the amino acid sequence of SEQ ID NO: 14.

[0133] In some embodiments, the modified BoNT polypeptide is a chimeric BoNT polypeptide comprising the modified receptor binding of BoNT/A1 described herein, and a protease domain and translocation domain from a BoNT of a different serotype (e.g., BoNT/B, C, D, E, F, G, H, X, or EN). In some embodiments, the modified BoNT polypeptide comprises a polypeptide comprising an amino acid sequence that is at least 70% (e.g., at least 70%, at least 75%, at least 80%, at least 85%, at least 90%, at least 95%, or at least 99%) identical to any one of SEQ ID NOs: 97-105, fused to a modified receptor bonding domain of BoNT/A1 comprising an amino acid substitution corresponding to D1062E in SEQ ID NO: 1. In some embodiments, the modified BoNT polypeptide comprises a polypeptide comprising an amino acid sequence that is at least 70% (e.g., at least 70%, at least 75%, at least 80%, at least 85%, at least 90%, at least 95%, or at least 99%) identical to any one of SEQ ID NOs: 97-105, fused to a modified receptor bonding domain of BoNT/A1 comprising an amino acid sequence that is at least 70% (e.g., at least 70%, at least 75%, at least 80%, at least 85%, at least 90%, at least 95%, or at least 99%) identical to SEQ ID NO: 49 and comprises an amino acid substitution corresponding to D1062E in SEQ ID NO: 1. In some embodiments, the modified BoNT polypeptide comprises a polypeptide comprising the amino acid sequence of any one of SEQ ID NOs: 97-105, fused to a modified receptor bonding domain of BoNT/A1 comprising the amino acid sequence of SEQ ID NO: 62. In some embodiments, the modified BoNT polypeptide comprises a polypeptide consisting of the amino acid sequence of any one of SEQ ID NOs: 97-105, fused to a modified receptor bonding domain of BoNT/A1 consisting of the amino acid sequence of SEQ ID NO: 62. In some embodiments, the modified BoNT polypeptide comprises the amino acid sequence of any one of SEQ ID NOs: 105-113 having an amino acid substitution corresponding to D1062E in SEQ ID NO: 1.

[0134] In some embodiments, the modified receptor binding domain comprises an amino acid substitution at a position corresponding to 1063 in SEQ ID NO: 1. In some embodiments, the modified receptor binding domain comprises an amino acid substitution corresponding to T1063P in SEQ ID NO: 1.

[0135] In some embodiments, the modified BoNT polypeptide is a modified receptor binding domain of BoNT/A1 described herein. In some embodiments, the modified BoNT polypeptide comprises an amino acid sequence that is at least 70% (e.g., at least 70%, at least 75%, at least 80%, at least 85%, at least 90%, at least 95%, or at least 99%) identical to SEQ ID NO: 49, and comprises an amino acid substitution corresponding to T1063P in SEQ ID NO: 49. In some embodiments, the modified BoNT polypeptide comprises the amino acid sequence of SEQ ID NO: 63. In some embodiments, the modified BoNT polypeptide consists of the amino acid sequence of SEQ ID NO: 63.

[0136] In some embodiments, the modified BoNT polypeptide is a full-length BoNT/A1 polypeptide comprising the modified receptor binding domain of BoNT/A1 described herein. In some embodiments, the modified BoNT polypeptide comprises an amino acid sequence that is at least 70% (e.g., at least 70%, at least 75%, at least 80%, at least 85%, at least 90%, at least 95%, or at least 99%) identical to SEQ ID NO: 1, and comprises an amino acid substitution corresponding to T1063P in SEQ ID NO: 1. In some embodiments, the modified BoNT polypeptide comprises the amino acid sequence of SEQ ID NO: 15. In some embodiments, the modified BoNT polypeptide consists of the amino acid sequence of SEQ ID NO: 15.

[0137] In some embodiments, the modified BoNT polypeptide is a chimeric BoNT polypeptide comprising the modified receptor binding of BoNT/A1 described herein, and a protease domain and translocation domain from a BoNT of a different serotype (e.g., BoNT/B, C, D, E, F, G, H, X, or EN). In some embodiments, the modified BoNT polypeptide comprises a polypeptide comprising an amino acid sequence that is at least 70% (e.g., at least 70%, at least 75%, at least 80%, at least 85%, at least 90%, at least 95%, or at least 99%) identical to any one of SEQ ID NOs: 97-105, fused to a modified receptor bonding domain of BoNT/A1 comprising an amino acid substitution corresponding to T1063P in SEQ ID NO: 1. In some embodiments, the modified BoNT polypeptide comprises a polypeptide comprising an amino acid sequence that is at least 70% (e.g., at least 70%, at least 75%, at least 80%, at least 85%, at least 90%, at least 95%, or at least 99%) identical to any one of SEQ ID NOs: 97-105, fused to a modified receptor bonding domain of BoNT/A1 comprising an amino acid sequence that is at least 70% (e.g., at least 70%, at least 75%, at least 80%, at least 85%, at least 90%, at least 95%, or at least 99%) identical to SEQ ID NO: 49 and comprises an amino acid substitution corresponding to T1063P in SEQ ID NO: 1. In some embodiments, the modified BoNT polypeptide comprises a polypeptide comprising the amino acid sequence of any one of SEQ ID NOs: 97-105, fused to a modified receptor bonding domain of BoNT/A1 comprising the amino acid sequence of SEQ ID NO: 63. In some embodiments, the modified BoNT polypeptide comprises a polypeptide consisting of the amino acid sequence of any one of SEQ ID NOs: 97-105, fused to a modified receptor bonding domain of BoNT/A1 consisting of the amino acid sequence of SEQ ID NO: 63. In some embodiments, the modified BoNT polypeptide comprises the amino acid sequence of any one of SEQ ID NOs: 105-113 having an amino acid substitution corresponding to T1063P in SEQ ID NO: 1.

[0138] In some embodiments, the modified receptor binding domain comprises an amino acid substitution at a position corresponding to 1064 in SEQ ID NO: 1. In some embodiments, the modified receptor binding domain comprises an amino acid substitution corresponding to H1064R or H1064Q in SEQ ID NO: 1.

[0139] In some embodiments, the modified BoNT polypeptide is a modified receptor binding domain of BoNT/A1 described herein. In some embodiments, the modified BoNT polypeptide comprises an amino acid sequence that is at least 70% (e.g., at least 70%, at least 75%, at least 80%, at least 85%, at least 90%, at least 95%, or at least 99%) identical to SEQ ID NO: 49, and comprises an amino acid substitution corresponding to H1064R or H1064Q in SEQ ID NO: 49. In some embodiments, the modified BoNT polypeptide comprises the amino acid sequence of SEQ ID NO: 64 or SEQ ID NO: 65. In some embodiments, the modified BoNT polypeptide consists of the amino acid sequence of SEQ ID NO: 64 or SEQ ID NO: 65.

[0140] In some embodiments, the modified BoNT polypeptide is a full-length BoNT/A1 polypeptide comprising the modified receptor binding domain of BoNT/A1 described herein. In some embodiments, the modified BoNT polypeptide comprises an amino acid sequence that is at least 70% (e.g., at least 70%, at least 75%, at least 80%, at least 85%, at least 90%, at least 95%, or at least 99%) identical to SEQ ID NO: 1, and comprises an amino acid substitution corresponding to H1064R or H1064Q in SEQ ID NO: 1. In some embodiments, the modified BoNT polypeptide comprises the amino acid sequence of SEQ ID NO: 16 or SEQ ID NO: 17. In some embodiments, the modified BoNT polypeptide consists of the amino acid sequence of SEQ ID NO: 16 or SEQ ID NO: 17.

[0141] In some embodiments, the modified BoNT polypeptide is a chimeric BoNT polypeptide comprising the modified receptor binding of BoNT/A1 described herein, and a protease domain and translocation domain from a BoNT of a different serotype (e.g., BoNT/B, C, D, E, F, G, H, X, or EN). In some embodiments, the modified BoNT polypeptide comprises a polypeptide comprising an amino acid sequence that is at least 70% (e.g., at least 70%, at least 75%, at least 80%, at least 85%, at least 90%, at least 95%, or at least 99%) identical to any one of SEQ ID NOs: 97-105, fused to a modified receptor bonding domain of BoNT/A1 comprising an amino acid substitution corresponding to H1064R or H1064Q in SEQ ID NO: 1. In some embodiments, the modified BoNT polypeptide comprises a polypeptide comprising an amino acid sequence that is at least 70% (e.g., at least 70%, at least 75%, at least 80%, at least 85%, at least 90%, at least 95%, or at least 99%) identical to any one of SEQ ID NOs: 97-105, fused to a modified receptor bonding domain of BoNT/A1 comprising an amino acid sequence that is at least 70% (e.g., at least 70%, at least 75%, at least 80%, at least 85%, at least 90%, at least 95%, or at least 99%) identical to SEQ ID NO: 49 and comprises an amino acid substitution corresponding to H1064R or H1064Q in SEQ ID NO: 1. In some embodiments, the modified BoNT polypeptide comprises a polypeptide comprising the amino acid sequence of any one of SEQ ID NOs: 97-105, fused to a modified receptor bonding domain of BoNT/A1 comprising the amino acid sequence of SEQ ID NO: 64 or SEQ ID NO: 65. In some embodiments, the modified BoNT polypeptide comprises a polypeptide consisting of the amino acid sequence of any one of SEQ ID NOs: 97-105, fused to a modified receptor bonding domain of BoNT/A1 consisting of the amino acid sequence of SEQ ID NO: 64 or SEQ ID NO: 65. In some embodiments, the modified BoNT polypeptide comprises the amino acid sequence of any one of SEQ ID NOs: 105-113 having an amino acid substitution corresponding to H1064R or H1064Q in SEQ ID NO: 1.

[0142] In some embodiments, the modified receptor binding domain comprises an amino acid substitution at a position corresponding to 1065 in SEQ ID NO: 1. In some embodiments, the modified receptor binding domain comprises an amino acid substitution corresponding to R1065N in SEQ ID NO: 1. These modified receptor binding domains can be referred to as BoNT/A1-R1065* (any amino acid substitution at position corresponding to 1064) and BoNT/A1-R1065N.

[0143] In some embodiments, the modified BoNT polypeptide is a modified receptor binding domain of BoNT/A1 described herein. In some embodiments, the modified BoNT polypeptide comprises an amino acid sequence that is at least 70% (e.g., at least 70%, at least 75%, at least 80%, at least 85%, at least 90%, at least 95%, or at least 99%) identical to SEQ ID NO: 49, and comprises an amino acid substitution corresponding to R1065N in SEQ ID NO: 49. In some embodiments, the modified BoNT polypeptide comprises the amino acid sequence of SEQ ID NO: 66. In some embodiments, the modified BoNT polypeptide consists of the amino acid sequence of SEQ ID NO: 66.

[0144] In some embodiments, the modified BoNT polypeptide is a full-length BoNT/A1 polypeptide comprising the modified receptor binding domain of BoNT/A1 described herein. In some embodiments, the modified BoNT polypeptide comprises an amino acid sequence that is at least 70% (e.g., at least 70%, at least 75%, at least 80%, at least 85%, at least 90%, at least 95%, or at least 99%) identical to SEQ ID NO: 1, and comprises an amino acid substitution corresponding to R1065N in SEQ ID NO: 1. In some embodiments, the modified BoNT polypeptide comprises the amino acid sequence of SEQ ID NO: 18. In some embodiments, the modified BoNT polypeptide consists of the amino acid sequence of SEQ ID NO: 18.

[0145] In some embodiments, the modified BoNT polypeptide is a chimeric BoNT polypeptide comprising the modified receptor binding of BoNT/A1 described herein, and a protease domain and translocation domain from a BoNT of a different serotype (e.g., BoNT/B, C, D, E, F, G, H, X, or EN). In some embodiments, the modified BoNT polypeptide comprises a polypeptide comprising an amino acid sequence that is at least 70% (e.g., at least 70%, at least 75%, at least 80%, at least 85%, at least 90%, at least 95%, or at least 99%) identical to any one of SEQ ID NOs: 97-105, fused to a modified receptor bonding domain of BoNT/A1 comprising an amino acid substitution corresponding to R1065N in SEQ ID NO: 1. In some embodiments, the modified BoNT polypeptide comprises a polypeptide comprising an amino acid sequence that is at least 70% (e.g., at least 70%, at least 75%, at least 80%, at least 85%, at least 90%, at least 95%, or at least 99%) identical to any one of SEQ ID NOs: 97-105, fused to a modified receptor bonding domain of BoNT/A1 comprising an amino acid sequence that is at least 70% (e.g., at least 70%, at least 75%, at least 80%, at least 85%, at least 90%, at least 95%, or at least 99%) identical to SEQ ID NO: 49 and comprises an amino acid substitution corresponding to R1065N in SEQ ID NO: 1. In some embodiments, the modified BoNT polypeptide comprises a polypeptide comprising the amino acid sequence of any one of SEQ ID NOs: 97-105, fused to a modified receptor bonding domain of BoNT/A1 comprising the amino acid sequence of SEQ ID NO: 66. In some embodiments, the modified BoNT polypeptide comprises a polypeptide consisting of the amino acid sequence of any one of SEQ ID NOs: 97-105, fused to a modified receptor bonding domain of BoNT/A1 consisting of the amino acid sequence of SEQ ID NO: 66. In some embodiments, the modified BoNT polypeptide comprises the amino acid sequence of any one of SEQ ID NOs: 105-113 having an amino acid substitution corresponding to R1065N in SEQ ID NO: 1.

[0146] In some embodiments, the modified receptor binding domain comprises an amino acid substitution at a position corresponding to 1066 in SEQ ID NO: 1. In some embodiments, the modified receptor binding domain comprises an amino acid substitution corresponding to Y1066R or Y1066K in SEQ ID NO: 1.

[0147] In some embodiments, the modified BoNT polypeptide is a modified receptor binding domain of BoNT/A1 described herein. In some embodiments, the modified BoNT polypeptide comprises an amino acid sequence that is at least 70% (e.g., at least 70%, at least 75%, at least 80%, at least 85%, at least 90%, at least 95%, or at least 99%) identical to SEQ ID NO: 49, and comprises an amino acid substitution corresponding to Y1066R or Y1066K in SEQ ID NO: 49. In some embodiments, the modified BoNT polypeptide comprises the amino acid sequence of SEQ ID NO: 67 or SEQ ID NO: 68. In some embodiments, the modified BoNT polypeptide consists of the amino acid sequence of SEQ ID NO: 67 or SEQ ID NO: 68.

[0148] In some embodiments, the modified BoNT polypeptide is a full-length BoNT/A1 polypeptide comprising the modified receptor binding domain of BoNT/A1 described herein. In some embodiments, the modified BoNT polypeptide comprises an amino acid sequence that is at least 70% (e.g., at least 70%, at least 75%, at least 80%, at least 85%, at least 90%, at least 95%, or at least 99%) identical to SEQ ID NO: 1, and comprises an amino acid substitution corresponding to Y1066R or Y1066K in SEQ ID NO: 1. In some embodiments, the modified BoNT polypeptide comprises the amino acid sequence of SEQ ID NO: 19 or SEQ ID NO: 20. In some embodiments, the modified BoNT polypeptide consists of the amino acid sequence of SEQ ID NO: 19 or SEQ ID NO: 20.

[0149] In some embodiments, the modified BoNT polypeptide is a chimeric BoNT polypeptide comprising the modified receptor binding of BoNT/A1 described herein, and a protease domain and translocation domain from a BoNT of a different serotype (e.g., BoNT/B, C, D, E, F, G, H, X, or EN). In some embodiments, the modified BoNT polypeptide comprises a polypeptide comprising an amino acid sequence that is at least 70% (e.g., at least 70%, at least 75%, at least 80%, at least 85%, at least 90%, at least 95%, or at least 99%) identical to any one of SEQ ID NOs: 97-105, fused to a modified receptor bonding domain of BoNT/A1 comprising an amino acid substitution corresponding to Y1066R or Y1066K in SEQ ID NO: 1. In some embodiments, the modified BoNT polypeptide comprises a polypeptide comprising an amino acid sequence that is at least 70% (e.g., at least 70%, at least 75%, at least 80%, at least 85%, at least 90%, at least 95%, or at least 99%) identical to any one of SEQ ID NOs: 97-105, fused to a modified receptor bonding domain of BoNT/A1 comprising an amino acid sequence that is at least 70% (e.g., at least 70%, at least 75%, at least 80%, at least 85%, at least 90%, at least 95%, or at least 99%) identical to SEQ ID NO: 49 and comprises an amino acid substitution corresponding to Y1066R or Y1066K in SEQ ID NO: 1. In some embodiments, the modified BoNT polypeptide comprises a polypeptide comprising the amino acid sequence of any one of SEQ ID NOs: 97-105, fused to a modified receptor bonding domain of BoNT/A1 comprising the amino acid sequence of SEQ ID NO: 67 or SEQ ID NO: 68. In some embodiments, the modified BoNT polypeptide comprises a polypeptide consisting of the amino acid sequence of any one of SEQ ID NOs: 97-105, fused to a modified receptor bonding domain of BoNT/A1 consisting of the amino acid sequence of SEQ ID NO: 67 or SEQ ID NO: 68. In some embodiments, the modified BoNT polypeptide comprises the amino acid sequence of any one of SEQ ID NOs: 105-113 having an amino acid substitution corresponding to Y1066R or Y1066K in SEQ ID NO: 1.

[0150] In some embodiments, the modified receptor binding domain comprises an amino acid substitution at a position corresponding to 1145 in SEQ ID NO: 1. In some embodiments, the modified receptor binding domain comprises an amino acid substitution corresponding to T1145Y in SEQ ID NO: 1.

[0151] In some embodiments, the modified BoNT polypeptide is a modified receptor binding domain of BoNT/A1 described herein. In some embodiments, the modified BoNT polypeptide comprises an amino acid sequence that is at least 70% (e.g., at least 70%, at least 75%, at least 80%, at least 85%, at least 90%, at least 95%, or at least 99%) identical to SEQ ID NO: 49, and comprises an amino acid substitution corresponding to T1145Y in SEQ ID NO: 49. In some embodiments, the modified BoNT polypeptide comprises the amino acid sequence of SEQ ID NO: 69. In some embodiments, the modified BoNT polypeptide consists of the amino acid sequence of SEQ ID NO: 69.

[0152] In some embodiments, the modified BoNT polypeptide is a full-length BoNT/A1 polypeptide comprising the modified receptor binding domain of BoNT/A1 described herein. In some embodiments, the modified BoNT polypeptide comprises an amino acid sequence that is at least 70% (e.g., at least 70%, at least 75%, at least 80%, at least 85%, at least 90%, at least 95%, or at least 99%) identical to SEQ ID NO: 1, and comprises an amino acid substitution corresponding to T1145Y in SEQ ID NO: 1. In some embodiments, the modified BoNT polypeptide comprises the amino acid sequence of SEQ ID NO: 21. In some embodiments, the modified BoNT polypeptide consists of the amino acid sequence of SEQ ID NO: 21.

[0153] In some embodiments, the modified BoNT polypeptide is a chimeric BoNT polypeptide comprising the modified receptor binding of BoNT/A1 described herein, and a protease domain and translocation domain from a BoNT of a different serotype (e.g., BoNT/B, C, D, E, F, G, H, X, or EN). In some embodiments, the modified BoNT polypeptide comprises a polypeptide comprising an amino acid sequence that is at least 70% (e.g., at least 70%, at least 75%, at least 80%, at least 85%, at least 90%, at least 95%, or at least 99%) identical to any one of SEQ ID NOs: 97-105, fused to a modified receptor bonding domain of BoNT/A1 comprising an amino acid substitution corresponding to T1145Y in SEQ ID NO: 1. In some embodiments, the modified BoNT polypeptide comprises a polypeptide comprising an amino acid sequence that is at least 70% (e.g., at least 70%, at least 75%, at least 80%, at least 85%, at least 90%, at least 95%, or at least 99%) identical to any one of SEQ ID NOs: 97-105, fused to a modified receptor bonding domain of BoNT/A1 comprising an amino acid sequence that is at least 70% (e.g., at least 70%, at least 75%, at least 80%, at least 85%, at least 90%, at least 95%, or at least 99%) identical to SEQ ID NO: 49 and comprises an amino acid substitution corresponding to T1145Y in SEQ ID NO: 1. In some embodiments, the modified BoNT polypeptide comprises a polypeptide comprising the amino acid sequence of any one of SEQ ID NOs: 97-105, fused to a modified receptor bonding domain of BoNT/A1 comprising the amino acid sequence of SEQ ID NO: 69. In some embodiments, the modified BoNT polypeptide comprises a polypeptide consisting of the amino acid sequence of any one of SEQ ID NOs: 97-105, fused to a modified receptor bonding domain of BoNT/A1 consisting of the amino acid sequence of SEQ ID NO: 69. In some embodiments, the modified BoNT polypeptide comprises the amino acid sequence of any one of SEQ ID NOs: 105-113 having an amino acid substitution corresponding to T1145Y in SEQ ID NO: 1.

[0154] In some embodiments, the modified receptor binding domain comprises an amino acid substitution at a position corresponding to 1156 in SEQ ID NO: 1. In some embodiments, the modified receptor binding domain comprises an amino acid substitution corresponding to R1156M or R1156I in SEQ ID NO: 1.

[0155] In some embodiments, the modified BoNT polypeptide is a modified receptor binding domain of BoNT/A1 described herein. In some embodiments, the modified BoNT polypeptide comprises an amino acid sequence that is at least 70% (e.g., at least 70%, at least 75%, at least 80%, at least 85%, at least 90%, at least 95%, or at least 99%) identical to SEQ ID NO: 49, and comprises an amino acid substitution corresponding to R1156M or R1156I in SEQ ID NO: 49. In some embodiments, the modified BoNT polypeptide comprises the amino acid sequence of SEQ ID NO: 70 or SEQ ID NO: 71. In some embodiments, the modified BoNT polypeptide consists of the amino acid sequence of SEQ ID NO: 70 or SEQ ID NO: 71.

[0156] In some embodiments, the modified BoNT polypeptide is a full-length BoNT/A1 polypeptide comprising the modified receptor binding domain of BoNT/A1 described herein. In some embodiments, the modified BoNT polypeptide comprises an amino acid sequence that is at least 70% (e.g., at least 70%, at least 75%, at least 80%, at least 85%, at least 90%, at least 95%, or at least 99%) identical to SEQ ID NO: 1, and comprises an amino acid substitution corresponding to R1156M or R1156I in SEQ ID NO: 1. In some embodiments, the modified BoNT polypeptide comprises the amino acid sequence of SEQ ID NO: 22 or SEQ ID NO: 23. In some embodiments, the modified BoNT polypeptide consists of the amino acid sequence of SEQ ID NO: 22 or SEQ ID NO: 23.

[0157] In some embodiments, the modified BoNT polypeptide is a chimeric BoNT polypeptide comprising the modified receptor binding of BoNT/A1 described herein, and a protease domain and translocation domain from a BoNT of a different serotype (e.g., BoNT/B, C, D, E, F, G, H, X, or EN). In some embodiments, the modified BoNT polypeptide comprises a polypeptide comprising an amino acid sequence that is at least 70% (e.g., at least 70%, at least 75%, at least 80%, at least 85%, at least 90%, at least 95%, or at least 99%) identical to any one of SEQ ID NOs: 97-105, fused to a modified receptor bonding domain of BoNT/A1 comprising an amino acid substitution corresponding to R1156M or R1156I in SEQ ID NO: 1. In some embodiments, the modified BoNT polypeptide comprises a polypeptide comprising an amino acid sequence that is at least 70% (e.g., at least 70%, at least 75%, at least 80%, at least 85%, at least 90%, at least 95%, or at least 99%) identical to any one of SEQ ID NOs: 97-105, fused to a modified receptor bonding domain of BoNT/A1 comprising an amino acid sequence that is at least 70% (e.g., at least 70%, at least 75%, at least 80%, at least 85%, at least 90%, at least 95%, or at least 99%) identical to SEQ ID NO: 49 and comprises an amino acid substitution corresponding to R1156M or R1156I in SEQ ID NO: 1. In some embodiments, the modified BoNT polypeptide comprises a polypeptide comprising the amino acid sequence of any one of SEQ ID NOs: 97-105, fused to a modified receptor bonding domain of BoNT/A1 comprising the amino acid sequence of SEQ ID NO: 22 or SEQ ID NO: 23. In some embodiments, the modified BoNT polypeptide comprises a polypeptide consisting of the amino acid sequence of any one of SEQ ID NOs: 97-105, fused to a modified receptor bonding domain of BoNT/A1 consisting of the amino acid sequence of SEQ ID NO: 22 or SEQ ID NO: 23. In some embodiments, the modified BoNT polypeptide comprises the amino acid sequence of any one of SEQ ID NOs: 105-113 having an amino acid substitution corresponding to R1156M or R1156I in SEQ ID NO: 1.

[0158] In some embodiments, the modified receptor binding domain comprises an amino acid substitution at a position corresponding to 1232 in SEQ ID NO: 1. In some embodiments, the modified receptor binding domain comprises an amino acid substitution corresponding to T1232R or T1232K in SEQ ID NO: 1.

[0159] In some embodiments, the modified BoNT polypeptide is a modified receptor binding domain of BoNT/A1 described herein. In some embodiments, the modified BoNT polypeptide comprises an amino acid sequence that is at least 70% (e.g., at least 70%, at least 75%, at least 80%, at least 85%, at least 90%, at least 95%, or at least 99%) identical to SEQ ID NO: 49, and comprises an amino acid substitution corresponding to T1232R or T1232K in SEQ ID NO: 49. In some embodiments, the modified BoNT polypeptide comprises the amino acid sequence of SEQ ID NO: 72 or SEQ ID NO: 73. In some embodiments, the modified BoNT polypeptide consists of the amino acid sequence of SEQ ID NO: 72 or SEQ ID NO: 73.

[0160] In some embodiments, the modified BoNT polypeptide is a full-length BoNT/A1 polypeptide comprising the modified receptor binding domain of BoNT/A1 described herein. In some embodiments, the modified BoNT polypeptide comprises an amino acid sequence that is at least 70% (e.g., at least 70%, at least 75%, at least 80%, at least 85%, at least 90%, at least 95%, or at least 99%) identical to SEQ ID NO: 1, and comprises an amino acid substitution corresponding to T1232R or T1232K in SEQ ID NO: 1. In some embodiments, the modified BoNT polypeptide comprises the amino acid sequence of SEQ ID NO: 24 or SEQ ID NO: 25. In some embodiments, the modified BoNT polypeptide consists of the amino acid sequence of SEQ ID NO: 24 or SEQ ID NO: 25.

[0161] In some embodiments, the modified BoNT polypeptide is a chimeric BoNT polypeptide comprising the modified receptor binding of BoNT/A1 described herein, and a protease domain and translocation domain from a BoNT of a different serotype (e.g., BoNT/B, C, D, E, F, G, H, X, or EN). In some embodiments, the modified BoNT polypeptide comprises a polypeptide comprising an amino acid sequence that is at least 70% (e.g., at least 70%, at least 75%, at least 80%, at least 85%, at least 90%, at least 95%, or at least 99%) identical to any one of SEQ ID NOs: 97-105, fused to a modified receptor bonding domain of BoNT/A1 comprising an amino acid substitution corresponding to T1232R or T1232K in SEQ ID NO: 1. In some embodiments, the modified BoNT polypeptide comprises a polypeptide comprising an amino acid sequence that is at least 70% (e.g., at least 70%, at least 75%, at least 80%, at least 85%, at least 90%, at least 95%, or at least 99%) identical to any one of SEQ ID NOs: 97-105, fused to a modified receptor bonding domain of BoNT/A1 comprising an amino acid sequence that is at least 70% (e.g., at least 70%, at least 75%, at least 80%, at least 85%, at least 90%, at least 95%, or at least 99%) identical to SEQ ID NO: 49 and comprises an amino acid substitution corresponding to T1232R or T1232K in SEQ ID NO: 1. In some embodiments, the modified BoNT polypeptide comprises a polypeptide comprising the amino acid sequence of any one of SEQ ID NOs: 97-105, fused to a modified receptor bonding domain of BoNT/A1 comprising the amino acid sequence of SEQ ID NO: 72 or SEQ ID NO: 73. In some embodiments, the modified BoNT polypeptide comprises a polypeptide consisting of the amino acid sequence of any one of SEQ ID NOs: 97-105, fused to a modified receptor bonding domain of BoNT/A1 consisting of the amino acid sequence of SEQ ID NO: 72 or SEQ ID NO: 73. In some embodiments, the modified BoNT polypeptide comprises the amino acid sequence of any one of SEQ ID NOs: 105-113 having an amino acid substitution corresponding to T1232R or T1232K in SEQ ID NO: 1.

[0162] In some embodiments, the modified receptor binding domain comprises an amino acid substitution at a position corresponding to 1272 in SEQ ID NO: 1. In some embodiments, the modified receptor binding domain comprises an amino acid substitution corresponding to E1272G in SEQ ID NO: 1.

[0163] In some embodiments, the modified BoNT polypeptide is a modified receptor binding domain of BoNT/A1 described herein. In some embodiments, the modified BoNT polypeptide comprises an amino acid sequence that is at least 70% (e.g., at least 70%, at least 75%, at least 80%, at least 85%, at least 90%, at least 95%, or at least 99%) identical to SEQ ID NO: 49, and comprises an amino acid substitution corresponding to E1272G in SEQ ID NO: 49. In some embodiments, the modified BoNT polypeptide comprises the amino acid sequence of SEQ ID NO: 74. In some embodiments, the modified BoNT polypeptide consists of the amino acid sequence of SEQ ID NO: 74.

[0164] In some embodiments, the modified BoNT polypeptide is a full-length BoNT/A1 polypeptide comprising the modified receptor binding domain of BoNT/A1 described herein. In some embodiments, the modified BoNT polypeptide comprises an amino acid sequence that is at least 70% (e.g., at least 70%, at least 75%, at least 80%, at least 85%, at least 90%, at least 95%, or at least 99%) identical to SEQ ID NO: 1, and comprises an amino acid substitution corresponding to E1272G in SEQ ID NO: 1. In some embodiments, the modified BoNT polypeptide comprises the amino acid sequence of SEQ ID NO: 26. In some embodiments, the modified BoNT polypeptide consists of the amino acid sequence of SEQ ID NO: 26.

[0165] In some embodiments, the modified BoNT polypeptide is a chimeric BoNT polypeptide comprising the modified receptor binding of BoNT/A1 described herein, and a protease domain and translocation domain from a BoNT of a different serotype (e.g., BoNT/B, C, D, E, F, G, H, X, or EN). In some embodiments, the modified BoNT polypeptide comprises a polypeptide comprising an amino acid sequence that is at least 70% (e.g., at least 70%, at least 75%, at least 80%, at least 85%, at least 90%, at least 95%, or at least 99%) identical to any one of SEQ ID NOs: 97-105, fused to a modified receptor bonding domain of BoNT/A1 comprising an amino acid substitution corresponding to E1272G in SEQ ID NO: 1. In some embodiments, the modified BoNT polypeptide comprises a polypeptide comprising an amino acid sequence that is at least 70% (e.g., at least 70%, at least 75%, at least 80%, at least 85%, at least 90%, at least 95%, or at least 99%) identical to any one of SEQ ID NOs: 97-105, fused to a modified receptor bonding domain of BoNT/A1 comprising an amino acid sequence that is at least 70% (e.g., at least 70%, at least 75%, at least 80%, at least 85%, at least 90%, at least 95%, or at least 99%) identical to SEQ ID NO: 49 and comprises an amino acid substitution corresponding to E1272G in SEQ ID NO: 1. In some embodiments, the modified BoNT polypeptide comprises a polypeptide comprising the amino acid sequence of any one of SEQ ID NOs: 97-105, fused to a modified receptor bonding domain of BoNT/A1 comprising the amino acid sequence of SEQ ID NO: 74. In some embodiments, the modified BoNT polypeptide comprises a polypeptide consisting of the amino acid sequence of any one of SEQ ID NOs: 97-105, fused to a modified receptor bonding domain of BoNT/A1 consisting of the amino acid sequence of SEQ ID NO: 74. In some embodiments, the modified BoNT polypeptide comprises the amino acid sequence of any one of SEQ ID NOs: 105-113 having an amino acid substitution corresponding to E1272G in SEQ ID NO: 1.

[0166] In some embodiments, the modified receptor binding domain comprises an amino acid substitution at a position corresponding to 1278 in SEQ ID NO: 1. In some embodiments, the modified receptor binding domain comprises an amino acid substitution corresponding to L1278F, L1278Y or L1278W in SEQ ID NO: 1.

[0167] In some embodiments, the modified BoNT polypeptide is a modified receptor binding domain of BoNT/A1 described herein. In some embodiments, the modified BoNT polypeptide comprises an amino acid sequence that is at least 70% (e.g., at least 70%, at least 75%, at least 80%, at least 85%, at least 90%, at least 95%, or at least 99%) identical to SEQ ID NO: 49, and comprises an amino acid substitution corresponding to L1278F, L1278Y or L1278W in SEQ ID NO: 49. In some embodiments, the modified BoNT polypeptide comprises the amino acid sequence of SEQ ID NO: 75, SEQ ID NO: 76 or SEQ ID NO: 77. In some embodiments, the modified BoNT polypeptide consists of the amino acid sequence of SEQ ID NO: 75, SEQ ID NO: 76 or SEQ ID NO: 77.

[0168] In some embodiments, the modified BoNT polypeptide is a full-length BoNT/A1 polypeptide comprising the modified receptor binding domain of BoNT/A1 described herein. In some embodiments, the modified BoNT polypeptide comprises an amino acid sequence that is at least 70% (e.g., at least 70%, at least 75%, at least 80%, at least 85%, at least 90%, at least 95%, or at least 99%) identical to SEQ ID NO: 1, and comprises an amino acid substitution corresponding to L1278F, L1278Y or L1278W in SEQ ID NO: 1. In some embodiments, the modified BoNT polypeptide comprises the amino acid sequence of SEQ ID NO: 27, SEQ ID NO: 28 or SEQ ID NO: 29. In some embodiments, the modified BoNT polypeptide consists of the amino acid sequence of SEQ ID NO: 27, SEQ ID NO: 28 or SEQ ID NO: 29.

[0169] In some embodiments, the modified BoNT polypeptide is a chimeric BoNT polypeptide comprising the modified receptor binding of BoNT/A1 described herein, and a protease domain and translocation domain from a BoNT of a different serotype (e.g., BoNT/B, C, D, E, F, G, H, X, or EN). In some embodiments, the modified BoNT polypeptide comprises a polypeptide comprising an amino acid sequence that is at least 70% (e.g., at least 70%, at least 75%, at least 80%, at least 85%, at least 90%, at least 95%, or at least 99%) identical to any one of SEQ ID NOs: 97-105, fused to a modified receptor bonding domain of BoNT/A1 comprising an amino acid substitution corresponding to L1278F, L1278Y or L1278W in SEQ ID NO: 1. In some embodiments, the modified BoNT polypeptide comprises a polypeptide comprising an amino acid sequence that is at least 70% (e.g., at least 70%, at least 75%, at least 80%, at least 85%, at least 90%, at least 95%, or at least 99%) identical to any one of SEQ ID NOs: 97-105, fused to a modified receptor bonding domain of BoNT/A1 comprising an amino acid sequence that is at least 70% (e.g., at least 70%, at least 75%, at least 80%, at least 85%, at least 90%, at least 95%, or at least 99%) identical to SEQ ID NO: 49 and comprises an amino acid substitution corresponding to L1278F, L1278Y or L1278W in SEQ ID NO: 1. In some embodiments, the modified BoNT polypeptide comprises a polypeptide comprising the amino acid sequence of any one of SEQ ID NOs: 97-105, fused to a modified receptor bonding domain of BoNT/A1 comprising the amino acid sequence of SEQ ID NO: 75, SEQ ID NO: 76 or SEQ ID NO: 77. In some embodiments, the modified BoNT polypeptide comprises a polypeptide consisting of the amino acid sequence of any one of SEQ ID NOs: 97-105, fused to a modified receptor bonding domain of BoNT/A1 consisting of the amino acid sequence of SEQ ID NO: 75, SEQ ID NO: 76 or SEQ ID NO: 77. In some embodiments, the modified BoNT polypeptide comprises the amino acid sequence of any one of SEQ ID NOs: 105-113 having an amino acid substitution corresponding to L1278F, L1278Y or L1278W in SEQ ID NO: 1.

[0170] In some embodiments, the modified receptor binding domain comprises an amino acid substitution at a position corresponding to 1288 in SEQ ID NO: 1. In some embodiments, the modified receptor binding domain comprises an amino acid substitution corresponding to D1288E in SEQ ID NO: 1.

[0171] In some embodiments, the modified BoNT polypeptide is a modified receptor binding domain of BoNT/A1 described herein. In some embodiments, the modified BoNT polypeptide comprises an amino acid sequence that is at least 70% (e.g., at least 70%, at least 75%, at least 80%, at least 85%, at least 90%, at least 95%, or at least 99%) identical to SEQ ID NO: 49, and comprises an amino acid substitution corresponding to D1288E in SEQ ID NO: 49. In some embodiments, the modified BoNT polypeptide comprises the amino acid sequence of SEQ ID NO: 78. In some embodiments, the modified BoNT polypeptide consists of the amino acid sequence of SEQ ID NO: 78.

[0172] In some embodiments, the modified BoNT polypeptide is a full-length BoNT/A1 polypeptide comprising the modified receptor binding domain of BoNT/A1 described herein. In some embodiments, the modified BoNT polypeptide comprises an amino acid sequence that is at least 70% (e.g., at least 70%, at least 75%, at least 80%, at least 85%, at least 90%, at least 95%, or at least 99%) identical to SEQ ID NO: 1, and comprises an amino acid substitution corresponding to D1288E in SEQ ID NO: 1. In some embodiments, the modified BoNT polypeptide comprises the amino acid sequence of SEQ ID NO: 30. In some embodiments, the modified BoNT polypeptide consists of the amino acid sequence of SEQ ID NO: 30.

[0173] In some embodiments, the modified BoNT polypeptide is a chimeric BoNT polypeptide comprising the modified receptor binding of BoNT/A1 described herein, and a protease domain and translocation domain from a BoNT of a different serotype (e.g., BoNT/B, C, D, E, F, G, H, X, or EN). In some embodiments, the modified BoNT polypeptide comprises a polypeptide comprising an amino acid sequence that is at least 70% (e.g., at least 70%, at least 75%, at least 80%, at least 85%, at least 90%, at least 95%, or at least 99%) identical to any one of SEQ ID NOs: 97-105, fused to a modified receptor bonding domain of BoNT/A1 comprising an amino acid substitution corresponding to D1288E in SEQ ID NO: 1. In some embodiments, the modified BoNT polypeptide comprises a polypeptide comprising an amino acid sequence that is at least 70% (e.g., at least 70%, at least 75%, at least 80%, at least 85%, at least 90%, at least 95%, or at least 99%) identical to any one of SEQ ID NOs: 97-105, fused to a modified receptor bonding domain of BoNT/A1 comprising an amino acid sequence that is at least 70% (e.g., at least 70%, at least 75%, at least 80%, at least 85%, at least 90%, at least 95%, or at least 99%) identical to SEQ ID NO: 49 and comprises an amino acid substitution corresponding to D1288E in SEQ ID NO: 1. In some embodiments, the modified BoNT polypeptide comprises a polypeptide comprising the amino acid sequence of any one of SEQ ID NOs: 97-105, fused to a modified receptor bonding domain of BoNT/A1 comprising the amino acid sequence of SEQ ID NO: 78. In some embodiments, the modified BoNT polypeptide comprises a polypeptide consisting of the amino acid sequence of any one of SEQ ID NOs: 97-105, fused to a modified receptor bonding domain of BoNT/A1 consisting of the amino acid sequence of SEQ ID NO: 78. In some embodiments, the modified BoNT polypeptide comprises the amino acid sequence of any one of SEQ ID NOs: 105-113 having an amino acid substitution corresponding to D1288E in SEQ ID NO: 1.

[0174] In some embodiments, the modified receptor binding domain comprises an amino acid substitution at a position corresponding to 1289 in SEQ ID NO: 1. In some embodiments, the modified receptor binding domain comprises an amino acid substitution corresponding to D1289Y in SEQ ID NO: 1.

[0175] In some embodiments, the modified BoNT polypeptide is a modified receptor binding domain of BoNT/A1 described herein. In some embodiments, the modified BoNT polypeptide comprises an amino acid sequence that is at least 70% (e.g., at least 70%, at least 75%, at least 80%, at least 85%, at least 90%, at least 95%, or at least 99%) identical to SEQ ID NO: 49, and comprises an amino acid substitution corresponding to D1289Y in SEQ ID NO: 49. In some embodiments, the modified BoNT polypeptide comprises the amino acid sequence of SEQ ID NO: 79. In some embodiments, the modified BoNT polypeptide consists of the amino acid sequence of SEQ ID NO: 79.

[0176] In some embodiments, the modified BoNT polypeptide is a full-length BoNT/A1 polypeptide comprising the modified receptor binding domain of BoNT/A1 described herein. In some embodiments, the modified BoNT polypeptide comprises an amino acid sequence that is at least 70% (e.g., at least 70%, at least 75%, at least 80%, at least 85%, at least 90%, at least 95%, or at least 99%) identical to SEQ ID NO: 1, and comprises an amino acid substitution corresponding to D1289Y in SEQ ID NO: 1. In some embodiments, the modified BoNT polypeptide comprises the amino acid sequence of SEQ ID NO: 31. In some embodiments, the modified BoNT polypeptide consists of the amino acid sequence of SEQ ID NO: 31.

[0177] In some embodiments, the modified BoNT polypeptide is a chimeric BoNT polypeptide comprising the modified receptor binding of BoNT/A1 described herein, and a protease domain and translocation domain from a BoNT of a different serotype (e.g., BoNT/B, C, D, E, F, G, H, X, or EN). In some embodiments, the modified BoNT polypeptide comprises a polypeptide comprising an amino acid sequence that is at least 70% (e.g., at least 70%, at least 75%, at least 80%, at least 85%, at least 90%, at least 95%, or at least 99%) identical to any one of SEQ ID NOs: 97-105, fused to a modified receptor bonding domain of BoNT/A1 comprising an amino acid substitution corresponding to D1289Y in SEQ ID NO: 1. In some embodiments, the modified BoNT polypeptide comprises a polypeptide comprising an amino acid sequence that is at least 70% (e.g., at least 70%, at least 75%, at least 80%, at least 85%, at least 90%, at least 95%, or at least 99%) identical to any one of SEQ ID NOs: 97-105, fused to a modified receptor bonding domain of BoNT/A1 comprising an amino acid sequence that is at least 70% (e.g., at least 70%, at least 75%, at least 80%, at least 85%, at least 90%, at least 95%, or at least 99%) identical to SEQ ID NO: 49 and comprises an amino acid substitution corresponding to D1289Y in SEQ ID NO: 1. In some embodiments, the modified BoNT polypeptide comprises a polypeptide comprising the amino acid sequence of any one of SEQ ID NOs: 97-105, fused to a modified receptor bonding domain of BoNT/A1 comprising the amino acid sequence of SEQ ID NO: 79. In some embodiments, the modified BoNT polypeptide comprises a polypeptide consisting of the amino acid sequence of any one of SEQ ID NOs: 97-105, fused to a modified receptor bonding domain of BoNT/A1 consisting of the amino acid sequence of SEQ ID NO: 79. In some embodiments, the modified BoNT polypeptide comprises the amino acid sequence of any one of SEQ ID NOs: 105-113 having an amino acid substitution corresponding to D1289Y in SEQ ID NO: 1.

[0178] In some embodiments, the modified receptor binding domain comprises an amino acid substitution at a position corresponding to 1292 in SEQ ID NO: 1. In some embodiments, the modified receptor binding domain comprises an amino acid substitution corresponding to G1292R or G1292K in SEQ ID NO: 1.

[0179] In some embodiments, the modified BoNT polypeptide is a modified receptor binding domain of BoNT/A1 described herein. In some embodiments, the modified BoNT polypeptide comprises an amino acid sequence that is at least 70% (e.g., at least 70%, at least 75%, at least 80%, at least 85%, at least 90%, at least 95%, or at least 99%) identical to SEQ ID NO: 49, and comprises an amino acid substitution corresponding to G1292R or G1292K in SEQ ID NO: 49. In some embodiments, the modified BoNT polypeptide comprises the amino acid sequence of SEQ ID NO: 80 or SEQ ID NO: 81. In some embodiments, the modified BoNT polypeptide consists of the amino acid sequence of SEQ ID NO: 80 or SEQ ID NO: 81.

[0180] In some embodiments, the modified BoNT polypeptide is a full-length BoNT/A1 polypeptide comprising the modified receptor binding domain of BoNT/A1 described herein. In some embodiments, the modified BoNT polypeptide comprises an amino acid sequence that is at least 70% (e.g., at least 70%, at least 75%, at least 80%, at least 85%, at least 90%, at least 95%, or at least 99%) identical to SEQ ID NO: 1, and comprises an amino acid substitution corresponding to G1292R or G1292K in SEQ ID NO: 1. In some embodiments, the modified BoNT polypeptide comprises the amino acid sequence of SEQ ID NO: 32 or SEQ ID NO: 33. In some embodiments, the modified BoNT polypeptide consists of the amino acid sequence of SEQ ID NO: 32 or SEQ ID NO: 33.

[0181] In some embodiments, the modified BoNT polypeptide is a chimeric BoNT polypeptide comprising the modified receptor binding of BoNT/A1 described herein, and a protease domain and translocation domain from a BoNT of a different serotype (e.g., BoNT/B, C, D, E, F, G, H, X, or EN). In some embodiments, the modified BoNT polypeptide comprises a polypeptide comprising an amino acid sequence that is at least 70% (e.g., at least 70%, at least 75%, at least 80%, at least 85%, at least 90%, at least 95%, or at least 99%) identical to any one of SEQ ID NOs: 97-105, fused to a modified receptor bonding domain of BoNT/A1 comprising an amino acid substitution corresponding to G1292R or G1292K in SEQ ID NO: 1. In some embodiments, the modified BoNT polypeptide comprises a polypeptide comprising an amino acid sequence that is at least 70% (e.g., at least 70%, at least 75%, at least 80%, at least 85%, at least 90%, at least 95%, or at least 99%) identical to any one of SEQ ID NOs: 97-105, fused to a modified receptor bonding domain of BoNT/A1 comprising an amino acid sequence that is at least 70% (e.g., at least 70%, at least 75%, at least 80%, at least 85%, at least 90%, at least 95%, or at least 99%) identical to SEQ ID NO: 49 and comprises an amino acid substitution corresponding to G1292R or G1292K in SEQ ID NO: 1. In some embodiments, the modified BoNT polypeptide comprises a polypeptide comprising the amino acid sequence of any one of SEQ ID NOs: 97-105, fused to a modified receptor bonding domain of BoNT/A1 comprising the amino acid sequence of SEQ ID NO: 80 or SEQ ID NO: 81. In some embodiments, the modified BoNT polypeptide comprises a polypeptide consisting of the amino acid sequence of any one of SEQ ID NOs: 97-105, fused to a modified receptor bonding domain of BoNT/A1 consisting of the amino acid sequence of SEQ ID NO: 80 or SEQ ID NO: 81. In some embodiments, the modified BoNT polypeptide comprises the amino acid sequence of any one of SEQ ID NOs: 105-113 having an amino acid substitution corresponding to G1292R or G1292K in SEQ ID NO: 1.

[0182] In some embodiments, the modified receptor binding domain comprises an amino acid substitution at a position corresponding to R1294S in SEQ ID NO: 1. In some embodiments, the modified receptor binding domain comprises an amino acid substitution corresponding to R1294S or R1294T in SEQ ID NO: 1.

[0183] In some embodiments, the modified BoNT polypeptide is a modified receptor binding domain of BoNT/A1 described herein. In some embodiments, the modified BoNT polypeptide comprises an amino acid sequence that is at least 70% (e.g., at least 70%, at least 75%, at least 80%, at least 85%, at least 90%, at least 95%, or at least 99%) identical to SEQ ID NO: 49, and comprises an amino acid substitution corresponding to R1294S or R1294T in SEQ ID NO: 49. In some embodiments, the modified BoNT polypeptide comprises the amino acid sequence of SEQ ID NO: 82 or SEQ ID NO: 83. In some embodiments, the modified BoNT polypeptide consists of the amino acid sequence of SEQ ID NO: 82 or SEQ ID NO: 83.

[0184] In some embodiments, the modified BoNT polypeptide is a full-length BoNT/A1 polypeptide comprising the modified receptor binding domain of BoNT/A1 described herein. In some embodiments, the modified BoNT polypeptide comprises an amino acid sequence that is at least 70% (e.g., at least 70%, at least 75%, at least 80%, at least 85%, at least 90%, at least 95%, or at least 99%) identical to SEQ ID NO: 1, and comprises an amino acid substitution corresponding to R1294S or R1294T in SEQ ID NO: 1. In some embodiments, the modified BoNT polypeptide comprises the amino acid sequence of SEQ ID NO: 34 or SEQ ID NO: 35. In some embodiments, the modified BoNT polypeptide consists of the amino acid sequence of SEQ ID NO: 34 or SEQ ID NO: 35.

[0185] In some embodiments, the modified BoNT polypeptide is a chimeric BoNT polypeptide comprising the modified receptor binding of BoNT/A1 described herein, and a protease domain and translocation domain from a BoNT of a different serotype (e.g., BoNT/B, C, D, E, F, G, H, X, or EN). In some embodiments, the modified BoNT polypeptide comprises a polypeptide comprising an amino acid sequence that is at least 70% (e.g., at least 70%, at least 75%, at least 80%, at least 85%, at least 90%, at least 95%, or at least 99%) identical to any one of SEQ ID NOs: 97-105, fused to a modified receptor bonding domain of BoNT/A1 comprising an amino acid substitution corresponding to R1294S or R1294T in SEQ ID NO: 1. In some embodiments, the modified BoNT polypeptide comprises a polypeptide comprising an amino acid sequence that is at least 70% (e.g., at least 70%, at least 75%, at least 80%, at least 85%, at least 90%, at least 95%, or at least 99%) identical to any one of SEQ ID NOs: 97-105, fused to a modified receptor bonding domain of BoNT/A1 comprising an amino acid sequence that is at least 70% (e.g., at least 70%, at least 75%, at least 80%, at least 85%, at least 90%, at least 95%, or at least 99%) identical to SEQ ID NO: 49 and comprises an amino acid substitution corresponding to R1294S or R1294T in SEQ ID NO: 1. In some embodiments, the modified BoNT polypeptide comprises a polypeptide comprising the amino acid sequence of any one of SEQ ID NOs: 97-105, fused to a modified receptor bonding domain of BoNT/A1 comprising the amino acid sequence of SEQ ID NO: 82 or SEQ ID NO: 83. In some embodiments, the modified BoNT polypeptide comprises a polypeptide consisting of the amino acid sequence of any one of SEQ ID NOs: 97-105, fused to a modified receptor bonding domain of BoNT/A1 consisting of the amino acid sequence of SEQ ID NO: 82 or SEQ ID NO: 83. In some embodiments, the modified BoNT polypeptide comprises the amino acid sequence of any one of SEQ ID NOs: 105-113 having an amino acid substitution corresponding to R1294S or R1294T in SEQ ID NO: 1.

[0186] In some embodiments, the modified receptor binding domain comprises an amino acid substitution at a position corresponding to 1295 in SEQ ID NO: 1. In some embodiments, the modified receptor binding domain comprises an amino acid substitution corresponding to P1295S or P1295T in SEQ ID NO: 1.

[0187] In some embodiments, the modified BoNT polypeptide is a modified receptor binding domain of BoNT/A1 described herein. In some embodiments, the modified BoNT polypeptide comprises an amino acid sequence that is at least 70% (e.g., at least 70%, at least 75%, at least 80%, at least 85%, at least 90%, at least 95%, or at least 99%) identical to SEQ ID NO: 49, and comprises an amino acid substitution corresponding to P1295S or P1295T in SEQ ID NO: 49. In some embodiments, the modified BoNT polypeptide comprises the amino acid sequence of SEQ ID NO: 84 or SEQ ID NO: 85. In some embodiments, the modified BoNT polypeptide consists of the amino acid sequence of SEQ ID NO: 84 or SEQ ID NO: 85.

[0188] In some embodiments, the modified BoNT polypeptide is a full-length BoNT/A1 polypeptide comprising the modified receptor binding domain of BoNT/A1 described herein. In some embodiments, the modified BoNT polypeptide comprises an amino acid sequence that is at least 70% (e.g., at least 70%, at least 75%, at least 80%, at least 85%, at least 90%, at least 95%, or at least 99%) identical to SEQ ID NO: 1, and comprises an amino acid substitution corresponding to P1295S or P1295T in SEQ ID NO: 1. In some embodiments, the modified BoNT polypeptide comprises the amino acid sequence of SEQ ID NO: 36 or SEQ ID NO: 37. In some embodiments, the modified BoNT polypeptide consists of the amino acid sequence of SEQ ID NO: 36 or SEQ ID NO: 37.

[0189] In some embodiments, the modified BoNT polypeptide is a chimeric BoNT polypeptide comprising the modified receptor binding of BoNT/A1 described herein, and a protease domain and translocation domain from a BoNT of a different serotype (e.g., BoNT/B, C, D, E, F, G, H, X, or EN). In some embodiments, the modified BoNT polypeptide comprises a polypeptide comprising an amino acid sequence that is at least 70% (e.g., at least 70%, at least 75%, at least 80%, at least 85%, at least 90%, at least 95%, or at least 99%) identical to any one of SEQ ID NOs: 97-105, fused to a modified receptor bonding domain of BoNT/A1 comprising an amino acid substitution corresponding to P1295S or P1295T in SEQ ID NO: 1. In some embodiments, the modified BoNT polypeptide comprises a polypeptide comprising an amino acid sequence that is at least 70% (e.g., at least 70%, at least 75%, at least 80%, at least 85%, at least 90%, at least 95%, or at least 99%) identical to any one of SEQ ID NOs: 97-105, fused to a modified receptor bonding domain of BoNT/A1 comprising an amino acid sequence that is at least 70% (e.g., at least 70%, at least 75%, at least 80%, at least 85%, at least 90%, at least 95%, or at least 99%) identical to SEQ ID NO: 49 and comprises an amino acid substitution corresponding to P1295S or P1295T in SEQ ID NO: 1. In some embodiments, the modified BoNT polypeptide comprises a polypeptide comprising the amino acid sequence of any one of SEQ ID NOs: 97-105, fused to a modified receptor bonding domain of BoNT/A1 comprising the amino acid sequence of SEQ ID NO: 84 or SEQ ID NO: 85. In some embodiments, the modified BoNT polypeptide comprises a polypeptide consisting of the amino acid sequence of any one of SEQ ID NOs: 97-105, fused to a modified receptor bonding domain of BoNT/A1 consisting of the amino acid sequence of SEQ ID NO: 84 or SEQ ID NO: 85. In some embodiments, the modified BoNT polypeptide comprises the amino acid sequence of any one of SEQ ID NOs: 105-113 having an amino acid substitution corresponding to P1295S or P1295T in SEQ ID NO: 1.

[0190] Some aspects of the present disclosure provide modified Clostridial Botulinum neurotoxin (BoNT) polypeptides comprising a modified receptor binding domain of Clostridial Botulinum serotype A2 (BoNT/A2). In some embodiments, the modified receptor binding domain of BoNT/A2 comprises one or more amino acid substitutions at positions corresponding to 915, 923, 1090, 1103, 1117, 1156, 1170, 1227, 1254, 1255, or 1256 in SEQ ID NO: 2. in SEQ ID NO: 2.

[0191] In some embodiments, the modified receptor binding domain comprises an amino acid substitution at a position corresponding to 915 in SEQ ID NO: 2. In some embodiments, the modified receptor binding domain comprises an amino acid substitution corresponding to K915Q in SEQ ID NO: 2.

[0192] In some embodiments, the modified BoNT polypeptide is a modified receptor binding domain of BoNT/A2 described herein. In some embodiments, the modified BoNT polypeptide comprises an amino acid sequence that is at least 70% (e.g., at least 70%, at least 75%, at least 80%, at least 85%, at least 90%, at least 95%, or at least 99%) identical to SEQ ID NO: 50, and comprises an amino acid substitution corresponding to K915Q in SEQ ID NO: 50. In some embodiments, the modified BoNT polypeptide comprises the amino acid sequence of SEQ ID NO: 86. In some embodiments, the modified BoNT polypeptide consists of the amino acid sequence of SEQ ID NO: 86.

[0193] In some embodiments, the modified BoNT polypeptide is a full-length BoNT/A2 polypeptide comprising the modified receptor binding of BoNT/A2 described herein. In some embodiments, the modified BoNT polypeptide comprises an amino acid sequence that is at least 70% (e.g., at least 70%, at least 75%, at least 80%, at least 85%, at least 90%, at least 95%, or at least 99%) identical to SEQ ID NO: 2, and comprises an amino acid substitution corresponding to K915Q in SEQ ID NO: 2. In some embodiments, the modified BoNT polypeptide comprises the amino acid sequence of SEQ ID NO: 38. In some embodiments, the modified BoNT polypeptide consists of the amino acid sequence of SEQ ID NO: 38.

[0194] In some embodiments, the modified BoNT polypeptide is a chimeric BoNT polypeptide comprising the modified receptor binding of BoNT/A2 described herein, and a protease domain and translocation domain from a BoNT of a different serotype (e.g., BoNT/B, C, D, E, F, G, H, X, or EN). In some embodiments, the modified BoNT polypeptide comprises a polypeptide comprising an amino acid sequence that is at least 70% (e.g., at least 70%, at least 75%, at least 80%, at least 85%, at least 90%, at least 95%, or at least 99%) identical to any one of SEQ ID NOs: 97-105, fused to a modified receptor bonding domain of BoNT/A2 comprising an amino acid substitution corresponding to K915Q in SEQ ID NO: 2. In some embodiments, the modified BoNT polypeptide comprises a polypeptide comprising an amino acid sequence that is at least 70% (e.g., at least 70%, at least 75%, at least 80%, at least 85%, at least 90%, at least 95%, or at least 99%) identical to any one of SEQ ID NOs: 97-105, fused to a modified receptor bonding domain of BoNT/A2 comprising an amino acid sequence that is at least 70% (e.g., at least 70%, at least 75%, at least 80%, at least 85%, at least 90%, at least 95%, or at least 99%) identical to SEQ ID NO: 50 and comprises an amino acid substitution corresponding to K915Q in SEQ ID NO: 2. In some embodiments, the modified BoNT polypeptide comprises a polypeptide comprising the amino acid sequence of any one of SEQ ID NOs: 97-105, fused to a modified receptor bonding domain of BoNT/A2 comprising the amino acid sequence of SEQ ID NO: 86. In some embodiments, the modified BoNT polypeptide comprises a polypeptide consisting of the amino acid sequence of any one of SEQ ID NOs: 97-105, fused to a modified receptor bonding domain of BoNT/A2 consisting of the amino acid sequence of SEQ ID NO: 86. In some embodiments, the modified BoNT polypeptide comprises the amino acid sequence of any one of SEQ ID NOs: 114-122 having an amino acid substitution corresponding to K915Q in SEQ ID NO: 2.

[0195] In some embodiments, the modified receptor binding domain comprises an amino acid substitution at a position corresponding to 923 in SEQ ID NO: 2. In some embodiments, the modified receptor binding domain comprises an amino acid substitution corresponding to T923K in SEQ ID NO: 2.

[0196] In some embodiments, the modified BoNT polypeptide is a modified receptor binding domain of BoNT/A2 described herein. In some embodiments, the modified BoNT polypeptide comprises an amino acid sequence that is at least 70% (e.g., at least 70%, at least 75%, at least 80%, at least 85%, at least 90%, at least 95%, or at least 99%) identical to SEQ ID NO: 50, and comprises an amino acid substitution corresponding to T923K in SEQ ID NO: 50. In some embodiments, the modified BoNT polypeptide comprises the amino acid sequence of SEQ ID NO: 87. In some embodiments, the modified BoNT polypeptide consists of the amino acid sequence of SEQ ID NO: 87.

[0197] In some embodiments, the modified BoNT polypeptide is a full-length BoNT/A2 polypeptide comprising the modified receptor binding of BoNT/A2 described herein. In some embodiments, the modified BoNT polypeptide comprises an amino acid sequence that is at least 70% (e.g., at least 70%, at least 75%, at least 80%, at least 85%, at least 90%, at least 95%, or at least 99%) identical to SEQ ID NO: 2, and comprises an amino acid substitution corresponding to T923K in SEQ ID NO: 2. In some embodiments, the modified BoNT polypeptide comprises the amino acid sequence of SEQ ID NO: 39. In some embodiments, the modified BoNT polypeptide consists of the amino acid sequence of SEQ ID NO: 39.

[0198] In some embodiments, the modified BoNT polypeptide is a chimeric BoNT polypeptide comprising the modified receptor binding of BoNT/A2 described herein, and a protease domain and translocation domain from a BoNT of a different serotype (e.g., BoNT/B, C, D, E, F, G, H, X, or EN). In some embodiments, the modified BoNT polypeptide comprises a polypeptide comprising an amino acid sequence that is at least 70% (e.g., at least 70%, at least 75%, at least 80%, at least 85%, at least 90%, at least 95%, or at least 99%) identical to any one of SEQ ID NOs: 97-105, fused to a modified receptor bonding domain of BoNT/A2 comprising an amino acid substitution corresponding to T923K in SEQ ID NO: 2. In some embodiments, the modified BoNT polypeptide comprises a polypeptide comprising an amino acid sequence that is at least 70% (e.g., at least 70%, at least 75%, at least 80%, at least 85%, at least 90%, at least 95%, or at least 99%) identical to any one of SEQ ID NOs: 97-105, fused to a modified receptor bonding domain of BoNT/A2 comprising an amino acid sequence that is at least 70% (e.g., at least 70%, at least 75%, at least 80%, at least 85%, at least 90%, at least 95%, or at least 99%) identical to SEQ ID NO: 50 and comprises an amino acid substitution corresponding to T923K in SEQ ID NO: 2. In some embodiments, the modified BoNT polypeptide comprises a polypeptide comprising the amino acid sequence of any one of SEQ ID NOs: 97-105, fused to a modified receptor bonding domain of BoNT/A2 comprising the amino acid sequence of SEQ ID NO: 87. In some embodiments, the modified BoNT polypeptide comprises a polypeptide consisting of the amino acid sequence of any one of SEQ ID NOs: 97-105, fused to a modified receptor bonding domain of BoNT/A2 consisting of the amino acid sequence of SEQ ID NO: 87. In some embodiments, the modified BoNT polypeptide comprises the amino acid sequence of any one of SEQ ID NOs: 114-122 having an amino acid substitution corresponding to T923K in SEQ ID NO: 2.

[0199] In some embodiments, the modified receptor binding domain comprises an amino acid substitution at a position corresponding to 1090 in SEQ ID NO: 2. In some embodiments, the modified receptor binding domain comprises an amino acid substitution corresponding to S1090N in SEQ ID NO: 2.

[0200] In some embodiments, the modified BoNT polypeptide is a modified receptor binding domain of BoNT/A2 described herein. In some embodiments, the modified BoNT polypeptide comprises an amino acid sequence that is at least 70% (e.g., at least 70%, at least 75%, at least 80%, at least 85%, at least 90%, at least 95%, or at least 99%) identical to SEQ ID NO: 50, and comprises an amino acid substitution corresponding to S1090N in SEQ ID NO: 50. In some embodiments, the modified BoNT polypeptide comprises the amino acid sequence of SEQ ID NO: 88. In some embodiments, the modified BoNT polypeptide consists of the amino acid sequence of SEQ ID NO: 88.

[0201] In some embodiments, the modified BoNT polypeptide is a full-length BoNT/A2 polypeptide comprising the modified receptor binding of BoNT/A2 described herein. In some embodiments, the modified BoNT polypeptide comprises an amino acid sequence that is at least 70% (e.g., at least 70%, at least 75%, at least 80%, at least 85%, at least 90%, at least 95%, or at least 99%) identical to SEQ ID NO: 2, and comprises an amino acid substitution corresponding to S1090N in SEQ ID NO: 2. In some embodiments, the modified BoNT polypeptide comprises the amino acid sequence of SEQ ID NO: 40. In some embodiments, the modified BoNT polypeptide consists of the amino acid sequence of SEQ ID NO: 40.

[0202] In some embodiments, the modified BoNT polypeptide is a chimeric BoNT polypeptide comprising the modified receptor binding of BoNT/A2 described herein, and a protease domain and translocation domain from a BoNT of a different serotype (e.g., BoNT/B, C, D, E, F, G, H, X, or EN). In some embodiments, the modified BoNT polypeptide comprises a polypeptide comprising an amino acid sequence that is at least 70% (e.g., at least 70%, at least 75%, at least 80%, at least 85%, at least 90%, at least 95%, or at least 99%) identical to any one of SEQ ID NOs: 97-105, fused to a modified receptor bonding domain of BoNT/A2 comprising an amino acid substitution corresponding to S1090N in SEQ ID NO: 2. In some embodiments, the modified BoNT polypeptide comprises a polypeptide comprising an amino acid sequence that is at least 70% (e.g., at least 70%, at least 75%, at least 80%, at least 85%, at least 90%, at least 95%, or at least 99%) identical to any one of SEQ ID NOs: 97-105, fused to a modified receptor bonding domain of BoNT/A2 comprising an amino acid sequence that is at least 70% (e.g., at least 70%, at least 75%, at least 80%, at least 85%, at least 90%, at least 95%, or at least 99%) identical to SEQ ID NO: 50 and comprises an amino acid substitution corresponding to S1090N in SEQ ID NO: 2. In some embodiments, the modified BoNT polypeptide comprises a polypeptide comprising the amino acid sequence of any one of SEQ ID NOs: 97-105, fused to a modified receptor bonding domain of BoNT/A2 comprising the amino acid sequence of SEQ ID NO: 88. In some embodiments, the modified BoNT polypeptide comprises a polypeptide consisting of the amino acid sequence of any one of SEQ ID NOs: 97-105, fused to a modified receptor bonding domain of BoNT/A2 consisting of the amino acid sequence of SEQ ID NO: 88. In some embodiments, the modified BoNT polypeptide comprises the amino acid sequence of any one of SEQ ID NOs: 114-122 having an amino acid substitution corresponding to S1090N in SEQ ID NO: 2.

[0203] In some embodiments, the modified receptor binding domain comprises an amino acid substitution at a position corresponding to 1103 in SEQ ID NO: 2. In some embodiments, the modified receptor binding domain comprises an amino acid substitution corresponding to N1103D in SEQ ID NO: 2.

[0204] In some embodiments, the modified BoNT polypeptide is a modified receptor binding domain of BoNT/A2 described herein. In some embodiments, the modified BoNT polypeptide comprises an amino acid sequence that is at least 70% (e.g., at least 70%, at least 75%, at least 80%, at least 85%, at least 90%, at least 95%, or at least 99%) identical to SEQ ID NO: 50, and comprises an amino acid substitution corresponding to N1103D in SEQ ID NO: 50. In some embodiments, the modified BoNT polypeptide comprises the amino acid sequence of SEQ ID NO: 89. In some embodiments, the modified BoNT polypeptide consists of the amino acid sequence of SEQ ID NO: 89.

[0205] In some embodiments, the modified BoNT polypeptide is a full-length BoNT/A2 polypeptide comprising the modified receptor binding of BoNT/A2 described herein. In some embodiments, the modified BoNT polypeptide comprises an amino acid sequence that is at least 70% (e.g., at least 70%, at least 75%, at least 80%, at least 85%, at least 90%, at least 95%, or at least 99%) identical to SEQ ID NO: 2, and comprises an amino acid substitution corresponding to N1103D in SEQ ID NO: 2. In some embodiments, the modified BoNT polypeptide comprises the amino acid sequence of SEQ ID NO: 41. In some embodiments, the modified BoNT polypeptide consists of the amino acid sequence of SEQ ID NO: 41.

[0206] In some embodiments, the modified BoNT polypeptide is a chimeric BoNT polypeptide comprising the modified receptor binding of BoNT/A2 described herein, and a protease domain and translocation domain from a BoNT of a different serotype (e.g., BoNT/B, C, D, E, F, G, H, X, or EN). In some embodiments, the modified BoNT polypeptide comprises a polypeptide comprising an amino acid sequence that is at least 70% (e.g., at least 70%, at least 75%, at least 80%, at least 85%, at least 90%, at least 95%, or at least 99%) identical to any one of SEQ ID NOs: 97-105, fused to a modified receptor bonding domain of BoNT/A2 comprising an amino acid substitution corresponding to N1103D in SEQ ID NO: 2. In some embodiments, the modified BoNT polypeptide comprises a polypeptide comprising an amino acid sequence that is at least 70% (e.g., at least 70%, at least 75%, at least 80%, at least 85%, at least 90%, at least 95%, or at least 99%) identical to any one of SEQ ID NOs: 97-105, fused to a modified receptor bonding domain of BoNT/A2 comprising an amino acid sequence that is at least 70% (e.g., at least 70%, at least 75%, at least 80%, at least 85%, at least 90%, at least 95%, or at least 99%) identical to SEQ ID NO: 50 and comprises an amino acid substitution corresponding to N1103D in SEQ ID NO: 2. In some embodiments, the modified BoNT polypeptide comprises a polypeptide comprising the amino acid sequence of any one of SEQ ID NOs: 97-105, fused to a modified receptor bonding domain of BoNT/A2 comprising the amino acid sequence of SEQ ID NO: 89. In some embodiments, the modified BoNT polypeptide comprises a polypeptide consisting of the amino acid sequence of any one of SEQ ID NOs: 97-105, fused to a modified receptor bonding domain of BoNT/A2 consisting of the amino acid sequence of SEQ ID NO: 89. In some embodiments, the modified BoNT polypeptide comprises the amino acid sequence of any one of SEQ ID NOs: 114-122 having an amino acid substitution corresponding to N1103D in SEQ ID NO: 2.

[0207] In some embodiments, the modified receptor binding domain comprises an amino acid substitution at a position corresponding to 1117 in SEQ ID NO: 2. In some embodiments, the modified receptor binding domain comprises an amino acid substitution corresponding to F1117Y in SEQ ID NO: 2.

[0208] In some embodiments, the modified BoNT polypeptide is a modified receptor binding domain of BoNT/A2 described herein. In some embodiments, the modified BoNT polypeptide comprises an amino acid sequence that is at least 70% (e.g., at least 70%, at least 75%, at least 80%, at least 85%, at least 90%, at least 95%, or at least 99%) identical to SEQ ID NO: 50, and comprises an amino acid substitution corresponding to F1117Y in SEQ ID NO: 50. In some embodiments, the modified BoNT polypeptide comprises the amino acid sequence of SEQ ID NO: 90. In some embodiments, the modified BoNT polypeptide consists of the amino acid sequence of SEQ ID NO: 90.

[0209] In some embodiments, the modified BoNT polypeptide is a full-length BoNT/A2 polypeptide comprising the modified receptor binding of BoNT/A2 described herein. In some embodiments, the modified BoNT polypeptide comprises an amino acid sequence that is at least 70% (e.g., at least 70%, at least 75%, at least 80%, at least 85%, at least 90%, at least 95%, or at least 99%) identical to SEQ ID NO: 2, and comprises an amino acid substitution corresponding to F1117Y in SEQ ID NO: 2. In some embodiments, the modified BoNT polypeptide comprises the amino acid sequence of SEQ ID NO: 42. In some embodiments, the modified BoNT polypeptide consists of the amino acid sequence of SEQ ID NO: 42.

[0210] In some embodiments, the modified BoNT polypeptide is a chimeric BoNT polypeptide comprising the modified receptor binding of BoNT/A2 described herein, and a protease domain and translocation domain from a BoNT of a different serotype (e.g., BoNT/B, C, D, E, F, G, H, X, or EN). In some embodiments, the modified BoNT polypeptide comprises a polypeptide comprising an amino acid sequence that is at least 70% (e.g., at least 70%, at least 75%, at least 80%, at least 85%, at least 90%, at least 95%, or at least 99%) identical to any one of SEQ ID NOs: 97-105, fused to a modified receptor bonding domain of BoNT/A2 comprising an amino acid substitution corresponding to F1117Y in SEQ ID NO: 2. In some embodiments, the modified BoNT polypeptide comprises a polypeptide comprising an amino acid sequence that is at least 70% (e.g., at least 70%, at least 75%, at least 80%, at least 85%, at least 90%, at least 95%, or at least 99%) identical to any one of SEQ ID NOs: 97-105, fused to a modified receptor bonding domain of BoNT/A2 comprising an amino acid sequence that is at least 70% (e.g., at least 70%, at least 75%, at least 80%, at least 85%, at least 90%, at least 95%, or at least 99%) identical to SEQ ID NO: 50 and comprises an amino acid substitution corresponding to F1117Y in SEQ ID NO: 2. In some embodiments, the modified BoNT polypeptide comprises a polypeptide comprising the amino acid sequence of any one of SEQ ID NOs: 97-105, fused to a modified receptor bonding domain of BoNT/A2 comprising the amino acid sequence of SEQ ID NO: 90. In some embodiments, the modified BoNT polypeptide comprises a polypeptide consisting of the amino acid sequence of any one of SEQ ID NOs: 97-105, fused to a modified receptor bonding domain of BoNT/A2 consisting of the amino acid sequence of SEQ ID NO: 90. In some embodiments, the modified BoNT polypeptide comprises the amino acid sequence of any one of SEQ ID NOs: 114-122 having an amino acid substitution corresponding to F1117Y in SEQ ID NO: 2.

[0211] In some embodiments, the modified receptor binding domain comprises an amino acid substitution at a position corresponding to 1156 in SEQ ID NO: 2. In some embodiments, the modified receptor binding domain comprises an amino acid substitution corresponding to E1156M in SEQ ID NO: 2.

[0212] In some embodiments, the modified BoNT polypeptide is a modified receptor binding domain of BoNT/A2 described herein. In some embodiments, the modified BoNT polypeptide comprises an amino acid sequence that is at least 70% (e.g., at least 70%, at least 75%, at least 80%, at least 85%, at least 90%, at least 95%, or at least 99%) identical to SEQ ID NO: 50, and comprises an amino acid substitution corresponding to E1156M in SEQ ID NO: 50. In some embodiments, the modified BoNT polypeptide comprises the amino acid sequence of SEQ ID NO: 91. In some embodiments, the modified BoNT polypeptide consists of the amino acid sequence of SEQ ID NO: 91.

[0213] In some embodiments, the modified BoNT polypeptide is a full-length BoNT/A2 polypeptide comprising the modified receptor binding of BoNT/A2 described herein. In some embodiments, the modified BoNT polypeptide comprises an amino acid sequence that is at least 70% (e.g., at least 70%, at least 75%, at least 80%, at least 85%, at least 90%, at least 95%, or at least 99%) identical to SEQ ID NO: 2, and comprises an amino acid substitution corresponding to E1156M in SEQ ID NO: 2. In some embodiments, the modified BoNT polypeptide comprises the amino acid sequence of SEQ ID NO: 43. In some embodiments, the modified BoNT polypeptide consists of the amino acid sequence of SEQ ID NO: 43.

[0214] In some embodiments, the modified BoNT polypeptide is a chimeric BoNT polypeptide comprising the modified receptor binding of BoNT/A2 described herein, and a protease domain and translocation domain from a BoNT of a different serotype (e.g., BoNT/B, C, D, E, F, G, H, X, or EN). In some embodiments, the modified BoNT polypeptide comprises a polypeptide comprising an amino acid sequence that is at least 70% (e.g., at least 70%, at least 75%, at least 80%, at least 85%, at least 90%, at least 95%, or at least 99%) identical to any one of SEQ ID NOs: 97-105, fused to a modified receptor bonding domain of BoNT/A2 comprising an amino acid substitution corresponding to E1156M in SEQ ID NO: 2. In some embodiments, the modified BoNT polypeptide comprises a polypeptide comprising an amino acid sequence that is at least 70% (e.g., at least 70%, at least 75%, at least 80%, at least 85%, at least 90%, at least 95%, or at least 99%) identical to any one of SEQ ID NOs: 97-105, fused to a modified receptor bonding domain of BoNT/A2 comprising an amino acid sequence that is at least 70% (e.g., at least 70%, at least 75%, at least 80%, at least 85%, at least 90%, at least 95%, or at least 99%) identical to SEQ ID NO: 50 and comprises an amino acid substitution corresponding to E1156M in SEQ ID NO: 2. In some embodiments, the modified BoNT polypeptide comprises a polypeptide comprising the amino acid sequence of any one of SEQ ID NOs: 97-105, fused to a modified receptor bonding domain of BoNT/A2 comprising the amino acid sequence of SEQ ID NO: 91. In some embodiments, the modified BoNT polypeptide comprises a polypeptide consisting of the amino acid sequence of any one of SEQ ID NOs: 97-105, fused to a modified receptor bonding domain of BoNT/A2 consisting of the amino acid sequence of SEQ ID NO: 91. In some embodiments, the modified BoNT polypeptide comprises the amino acid sequence of any one of SEQ ID NOs: 114-122 having an amino acid substitution corresponding to E1156M in SEQ ID NO: 2.

[0215] In some embodiments, the modified receptor binding domain comprises an amino acid substitution at a position corresponding to 1170 in SEQ ID NO: 2. In some embodiments, the modified receptor binding domain comprises an amino acid substitution corresponding to E1170K in SEQ ID NO: 2.

[0216] In some embodiments, the modified BoNT polypeptide is a modified receptor binding domain of BoNT/A2 described herein. In some embodiments, the modified BoNT polypeptide comprises an amino acid sequence that is at least 70% (e.g., at least 70%, at least 75%, at least 80%, at least 85%, at least 90%, at least 95%, or at least 99%) identical to SEQ ID NO: 50, and comprises an amino acid substitution corresponding to E1170K in SEQ ID NO: 50. In some embodiments, the modified BoNT polypeptide comprises the amino acid sequence of SEQ ID NO: 92. In some embodiments, the modified BoNT polypeptide consists of the amino acid sequence of SEQ ID NO: 92.

[0217] In some embodiments, the modified BoNT polypeptide is a full-length BoNT/A2 polypeptide comprising the modified receptor binding of BoNT/A2 described herein. In some embodiments, the modified BoNT polypeptide comprises an amino acid sequence that is at least 70% (e.g., at least 70%, at least 75%, at least 80%, at least 85%, at least 90%, at least 95%, or at least 99%) identical to SEQ ID NO: 2, and comprises an amino acid substitution corresponding to E1170K in SEQ ID NO: 2. In some embodiments, the modified BoNT polypeptide comprises the amino acid sequence of SEQ ID NO: 44. In some embodiments, the modified BoNT polypeptide consists of the amino acid sequence of SEQ ID NO: 44.

[0218] In some embodiments, the modified BoNT polypeptide is a chimeric BoNT polypeptide comprising the modified receptor binding of BoNT/A2 described herein, and a protease domain and translocation domain from a BoNT of a different serotype (e.g., BoNT/B, C, D, E, F, G, H, X, or EN). In some embodiments, the modified BoNT polypeptide comprises a polypeptide comprising an amino acid sequence that is at least 70% (e.g., at least 70%, at least 75%, at least 80%, at least 85%, at least 90%, at least 95%, or at least 99%) identical to any one of SEQ ID NOs: 97-105, fused to a modified receptor bonding domain of BoNT/A2 comprising an amino acid substitution corresponding to E1170K in SEQ ID NO: 2. In some embodiments, the modified BoNT polypeptide comprises a polypeptide comprising an amino acid sequence that is at least 70% (e.g., at least 70%, at least 75%, at least 80%, at least 85%, at least 90%, at least 95%, or at least 99%) identical to any one of SEQ ID NOs: 97-105, fused to a modified receptor bonding domain of BoNT/A2 comprising an amino acid sequence that is at least 70% (e.g., at least 70%, at least 75%, at least 80%, at least 85%, at least 90%, at least 95%, or at least 99%) identical to SEQ ID NO: 50 and comprises an amino acid substitution corresponding to E1170K in SEQ ID NO: 2. In some embodiments, the modified BoNT polypeptide comprises a polypeptide comprising the amino acid sequence of any one of SEQ ID NOs: 97-105, fused to a modified receptor bonding domain of BoNT/A2 comprising the amino acid sequence of SEQ ID NO: 92. In some embodiments, the modified BoNT polypeptide comprises a polypeptide consisting of the amino acid sequence of any one of SEQ ID NOs: 97-105, fused to a modified receptor bonding domain of BoNT/A2 consisting of the amino acid sequence of SEQ ID NO: 92. In some embodiments, the modified BoNT polypeptide comprises the amino acid sequence of any one of SEQ ID NOs: 114-122 having an amino acid substitution corresponding to E1170K in SEQ ID NO: 2.

[0219] In some embodiments, the modified receptor binding domain comprises an amino acid substitution at a position corresponding to 1227 in SEQ ID NO: 2. In some embodiments, the modified receptor binding domain comprises an amino acid substitution corresponding to D1227N in SEQ ID NO: 2.

[0220] In some embodiments, the modified BoNT polypeptide is a modified receptor binding domain of BoNT/A2 described herein. In some embodiments, the modified BoNT polypeptide comprises an amino acid sequence that is at least 70% (e.g., at least 70%, at least 75%, at least 80%, at least 85%, at least 90%, at least 95%, or at least 99%) identical to SEQ ID NO: 50, and comprises an amino acid substitution corresponding to D1227N in SEQ ID NO: 50. In some embodiments, the modified BoNT polypeptide comprises the amino acid sequence of SEQ ID NO: 93. In some embodiments, the modified BoNT polypeptide consists of the amino acid sequence of SEQ ID NO: 93.

[0221] In some embodiments, the modified BoNT polypeptide is a full-length BoNT/A2 polypeptide comprising the modified receptor binding of BoNT/A2 described herein. In some embodiments, the modified BoNT polypeptide comprises an amino acid sequence that is at least 70% (e.g., at least 70%, at least 75%, at least 80%, at least 85%, at least 90%, at least 95%, or at least 99%) identical to SEQ ID NO: 2, and comprises an amino acid substitution corresponding to D1227N in SEQ ID NO: 2. In some embodiments, the modified BoNT polypeptide comprises the amino acid sequence of SEQ ID NO: 45. In some embodiments, the modified BoNT polypeptide consists of the amino acid sequence of SEQ ID NO: 45.

[0222] In some embodiments, the modified BoNT polypeptide is a chimeric BoNT polypeptide comprising the modified receptor binding of BoNT/A2 described herein, and a protease domain and translocation domain from a BoNT of a different serotype (e.g., BoNT/B, C, D, E, F, G, H, X, or EN). In some embodiments, the modified BoNT polypeptide comprises a polypeptide comprising an amino acid sequence that is at least 70% (e.g., at least 70%, at least 75%, at least 80%, at least 85%, at least 90%, at least 95%, or at least 99%) identical to any one of SEQ ID NOs: 97-105, fused to a modified receptor bonding domain of BoNT/A2 comprising an amino acid substitution corresponding to D1227N in SEQ ID NO: 2. In some embodiments, the modified BoNT polypeptide comprises a polypeptide comprising an amino acid sequence that is at least 70% (e.g., at least 70%, at least 75%, at least 80%, at least 85%, at least 90%, at least 95%, or at least 99%) identical to any one of SEQ ID NOs: 97-105, fused to a modified receptor bonding domain of BoNT/A2 comprising an amino acid sequence that is at least 70% (e.g., at least 70%, at least 75%, at least 80%, at least 85%, at least 90%, at least 95%, or at least 99%) identical to SEQ ID NO: 50 and comprises an amino acid substitution corresponding to D1227N in SEQ ID NO: 2. In some embodiments, the modified BoNT polypeptide comprises a polypeptide comprising the amino acid sequence of any one of SEQ ID NOs: 97-105, fused to a modified receptor bonding domain of BoNT/A2 comprising the amino acid sequence of SEQ ID NO: 93. In some embodiments, the modified BoNT polypeptide comprises a polypeptide consisting of the amino acid sequence of any one of SEQ ID NOs: 97-105, fused to a modified receptor bonding domain of BoNT/A2 consisting of the amino acid sequence of SEQ ID NO: 93. In some embodiments, the modified BoNT polypeptide comprises the amino acid sequence of any one of SEQ ID NOs: 114-122 having an amino acid substitution corresponding to D1227N in SEQ ID NO: 2.

[0223] In some embodiments, the modified receptor binding domain comprises an amino acid substitution at a position corresponding to 1254 in SEQ ID NO: 2. In some embodiments, the modified receptor binding domain comprises an amino acid substitution corresponding to L1254Q in SEQ ID NO: 2.

[0224] In some embodiments, the modified BoNT polypeptide is a modified receptor binding domain of BoNT/A2 described herein. In some embodiments, the modified BoNT polypeptide comprises an amino acid sequence that is at least 70% (e.g., at least 70%, at least 75%, at least 80%, at least 85%, at least 90%, at least 95%, or at least 99%) identical to SEQ ID NO: 50, and comprises an amino acid substitution corresponding to L1254Q in SEQ ID NO: 50. In some embodiments, the modified BoNT polypeptide comprises the amino acid sequence of SEQ ID NO: 94. In some embodiments, the modified BoNT polypeptide consists of the amino acid sequence of SEQ ID NO: 94.

[0225] In some embodiments, the modified BoNT polypeptide is a full-length BoNT/A2 polypeptide comprising the modified receptor binding of BoNT/A2 described herein. In some embodiments, the modified BoNT polypeptide comprises an amino acid sequence that is at least 70% (e.g., at least 70%, at least 75%, at least 80%, at least 85%, at least 90%, at least 95%, or at least 99%) identical to SEQ ID NO: 2, and comprises an amino acid substitution corresponding to L1254Q in SEQ ID NO: 2. In some embodiments, the modified BoNT polypeptide comprises the amino acid sequence of SEQ ID NO: 46. In some embodiments, the modified BoNT polypeptide consists of the amino acid sequence of SEQ ID NO: 46.

[0226] In some embodiments, the modified BoNT polypeptide is a chimeric BoNT polypeptide comprising the modified receptor binding of BoNT/A2 described herein, and a protease domain and translocation domain from a BoNT of a different serotype (e.g., BoNT/B, C, D, E, F, G, H, X, or EN). In some embodiments, the modified BoNT polypeptide comprises a polypeptide comprising an amino acid sequence that is at least 70% (e.g., at least 70%, at least 75%, at least 80%, at least 85%, at least 90%, at least 95%, or at least 99%) identical to any one of SEQ ID NOs: 97-105, fused to a modified receptor bonding domain of BoNT/A2 comprising an amino acid substitution corresponding to L1254Q in SEQ ID NO: 2. In some embodiments, the modified BoNT polypeptide comprises a polypeptide comprising an amino acid sequence that is at least 70% (e.g., at least 70%, at least 75%, at least 80%, at least 85%, at least 90%, at least 95%, or at least 99%) identical to any one of SEQ ID NOs: 97-105, fused to a modified receptor bonding domain of BoNT/A2 comprising an amino acid sequence that is at least 70% (e.g., at least 70%, at least 75%, at least 80%, at least 85%, at least 90%, at least 95%, or at least 99%) identical to SEQ ID NO: 50 and comprises an amino acid substitution corresponding to L1254Q in SEQ ID NO: 2. In some embodiments, the modified BoNT polypeptide comprises a polypeptide comprising the amino acid sequence of any one of SEQ ID NOs: 97-105, fused to a modified receptor bonding domain of BoNT/A2 comprising the amino acid sequence of SEQ ID NO: 94. In some embodiments, the modified BoNT polypeptide comprises a polypeptide consisting of the amino acid sequence of any one of SEQ ID NOs: 97-105, fused to a modified receptor bonding domain of BoNT/A2 consisting of the amino acid sequence of SEQ ID NO: 94. In some embodiments, the modified BoNT polypeptide comprises the amino acid sequence of any one of SEQ ID NOs: 114-122 having an amino acid substitution corresponding to L1254Q in SEQ ID NO: 2.

[0227] In some embodiments, the modified receptor binding domain comprises an amino acid substitution at a position corresponding to 1255 in SEQ ID NO: 2. In some embodiments, the modified receptor binding domain comprises an amino acid substitution corresponding to Y1255F in SEQ ID NO: 2.

[0228] In some embodiments, the modified BoNT polypeptide is a modified receptor binding domain of BoNT/A2 described herein. In some embodiments, the modified BoNT polypeptide comprises an amino acid sequence that is at least 70% (e.g., at least 70%, at least 75%, at least 80%, at least 85%, at least 90%, at least 95%, or at least 99%) identical to SEQ ID NO: 50, and comprises an amino acid substitution corresponding to Y1255F in SEQ ID NO: 50. In some embodiments, the modified BoNT polypeptide comprises the amino acid sequence of SEQ ID NO: 95. In some embodiments, the modified BoNT polypeptide consists of the amino acid sequence of SEQ ID NO: 95.

[0229] In some embodiments, the modified BoNT polypeptide is a full-length BoNT/A2 polypeptide comprising the modified receptor binding of BoNT/A2 described herein. In some embodiments, the modified BoNT polypeptide comprises an amino acid sequence that is at least 70% (e.g., at least 70%, at least 75%, at least 80%, at least 85%, at least 90%, at least 95%, or at least 99%) identical to SEQ ID NO: 2, and comprises an amino acid substitution corresponding to Y1255F in SEQ ID NO: 2. In some embodiments, the modified BoNT polypeptide comprises the amino acid sequence of SEQ ID NO: 47. In some embodiments, the modified BoNT polypeptide consists of the amino acid sequence of SEQ ID NO: 47.

[0230] In some embodiments, the modified BoNT polypeptide is a chimeric BoNT polypeptide comprising the modified receptor binding of BoNT/A2 described herein, and a protease domain and translocation domain from a BoNT of a different serotype (e.g., BoNT/B, C, D, E, F, G, H, X, or EN). In some embodiments, the modified BoNT polypeptide comprises a polypeptide comprising an amino acid sequence that is at least 70% (e.g., at least 70%, at least 75%, at least 80%, at least 85%, at least 90%, at least 95%, or at least 99%) identical to any one of SEQ ID NOs: 97-105, fused to a modified receptor bonding domain of BoNT/A2 comprising an amino acid substitution corresponding to Y1255F in SEQ ID NO: 2. In some embodiments, the modified BoNT polypeptide comprises a polypeptide comprising an amino acid sequence that is at least 70% (e.g., at least 70%, at least 75%, at least 80%, at least 85%, at least 90%, at least 95%, or at least 99%) identical to any one of SEQ ID NOs: 97-105, fused to a modified receptor bonding domain of BoNT/A2 comprising an amino acid sequence that is at least 70% (e.g., at least 70%, at least 75%, at least 80%, at least 85%, at least 90%, at least 95%, or at least 99%) identical to SEQ ID NO: 50 and comprises an amino acid substitution corresponding to Y1255F in SEQ ID NO: 2. In some embodiments, the modified BoNT polypeptide comprises a polypeptide comprising the amino acid sequence of any one of SEQ ID NOs: 97-105, fused to a modified receptor bonding domain of BoNT/A2 comprising the amino acid sequence of SEQ ID NO: 95. In some embodiments, the modified BoNT polypeptide comprises a polypeptide consisting of the amino acid sequence of any one of SEQ ID NOs: 97-105, fused to a modified receptor bonding domain of BoNT/A2 consisting of the amino acid sequence of SEQ ID NO: 95. In some embodiments, the modified BoNT polypeptide comprises the amino acid sequence of any one of SEQ ID NOs: 114-122 having an amino acid substitution corresponding to Y1255F in SEQ ID NO: 2.

[0231] In some embodiments, the modified receptor binding domain comprises an amino acid substitution at a position corresponding to 1256 in SEQ ID NO: 2. In some embodiments, the modified receptor binding domain comprises an amino acid substitution corresponding to D1256N in SEQ ID NO: 2.

[0232] In some embodiments, the modified BoNT polypeptide is a modified receptor binding domain of BoNT/A2 described herein. In some embodiments, the modified BoNT polypeptide comprises an amino acid sequence that is at least 70% (e.g., at least 70%, at least 75%, at least 80%, at least 85%, at least 90%, at least 95%, or at least 99%) identical to SEQ ID NO: 50, and comprises an amino acid substitution corresponding to D1256N in SEQ ID NO: 50. In some embodiments, the modified BoNT polypeptide comprises the amino acid sequence of SEQ ID NO: 96. In some embodiments, the modified BoNT polypeptide consists of the amino acid sequence of SEQ ID NO: 96.

[0233] In some embodiments, the modified BoNT polypeptide is a full-length BoNT/A2 polypeptide comprising the modified receptor binding of BoNT/A2 described herein. In some embodiments, the modified BoNT polypeptide comprises an amino acid sequence that is at least 70% (e.g., at least 70%, at least 75%, at least 80%, at least 85%, at least 90%, at least 95%, or at least 99%) identical to SEQ ID NO: 2, and comprises an amino acid substitution corresponding to D1256N in SEQ ID NO: 2. In some embodiments, the modified BoNT polypeptide comprises the amino acid sequence of SEQ ID NO: 48. In some embodiments, the modified BoNT polypeptide consists of the amino acid sequence of SEQ ID NO: 48.

[0234] In some embodiments, the modified BoNT polypeptide is a chimeric BoNT polypeptide comprising the modified receptor binding of BoNT/A2 described herein, and a protease domain and translocation domain from a BoNT of a different serotype (e.g., BoNT/B, C, D, E, F, G, H, X, or EN). In some embodiments, the modified BoNT polypeptide comprises a polypeptide comprising an amino acid sequence that is at least 70% (e.g., at least 70%, at least 75%, at least 80%, at least 85%, at least 90%, at least 95%, or at least 99%) identical to any one of SEQ ID NOs: 97-105, fused to a modified receptor bonding domain of BoNT/A2 comprising an amino acid substitution corresponding to D1256N in SEQ ID NO: 2. In some embodiments, the modified BoNT polypeptide comprises a polypeptide comprising an amino acid sequence that is at least 70% (e.g., at least 70%, at least 75%, at least 80%, at least 85%, at least 90%, at least 95%, or at least 99%) identical to any one of SEQ ID NOs: 97-105, fused to a modified receptor bonding domain of BoNT/A2 comprising an amino acid sequence that is at least 70% (e.g., at least 70%, at least 75%, at least 80%, at least 85%, at least 90%, at least 95%, or at least 99%) identical to SEQ ID NO: 50 and comprises an amino acid substitution corresponding to D1256N in SEQ ID NO: 2. In some embodiments, the modified BoNT polypeptide comprises a polypeptide comprising the amino acid sequence of any one of SEQ ID NOs: 97-105, fused to a modified receptor bonding domain of BoNT/A2 comprising the amino acid sequence of SEQ ID NO: 96. In some embodiments, the modified BoNT polypeptide comprises a polypeptide consisting of the amino acid sequence of any one of SEQ ID NOs: 97-105, fused to a modified receptor bonding domain of BoNT/A2 consisting of the amino acid sequence of SEQ ID NO: 96. In some embodiments, the modified BoNT polypeptide comprises the amino acid sequence of any one of SEQ ID NOs: 114-122 having an amino acid substitution corresponding to D1256N in SEQ ID NO: 2.

[0235] In some embodiments, the modified BoNT receptor binding domains described herein may be referred to using a generic nomenclature as follows: H_{C}-[BoNT serotype]-[wildtype amino acid corresponding to modification] [modification position in full length BoNT serotype amino acid sequence][substitution mutation]. In a non-limiting example, H_{C}-BoNT/A1-F917* refers to a modified BoNT/A1 receptor binding domain comprising an amino acid substitution at a position corresponding to 917 in SEQ ID NO: 1, where * indicates a substitution mutation to any other amino acid. In a non-limiting example, H_{C}-BoNT/A1-F917R refers to a modified BoNT/A1 receptor binding domain comprising an amino acid substitution at a position corresponding to 917 in SEQ ID NO: 1, wherein the amino acid substitution corresponds to F917R in SEQ ID NO: 1. This nomenclature is used in Table 8.

[0236] In some embodiments, the modified BoNT described herein may be referred to using a generic nomenclature as follows: [BoNT serotype]-[wildtype amino acid corresponding to modification] [modification position in full length BoNT serotype amino acid sequence][substitution mutation]. In a non-limiting example, BoNT/A1-F917* refers to a modified BoNT/A1 comprising an amino acid substitution at a position corresponding to 917 in SEQ ID NO: 1 where * indicates a substitution mutation to any other amino acid. In a non-limiting example, BoNT/A1-F917R refers to a modified BoNT/A1 comprising an amino acid substitution at a position corresponding to 917 in SEQ ID NO: 1, wherein the amino acid substitution corresponds to F917R in SEQ ID NO: 1. This nomenclature is used in Table 8.

[0237] In some embodiments, a generic nomenclature may be used to describe a chimeric BoNT polypeptide with a modified receptor binding domain as follows: [BoNT protease and translocation domain serotype]|[BoNT receptor binding domain serotype]-[wildtype amino acid corresponding to modification] [modification position in full length BoNT serotype amino acid sequence][substitution mutation]. In a non-limiting example, BoNT/BIA1-F917* refers to the protease and transmembrane domain of BoNT/B fused with a BoNT/A1 modified receptor binding domain comprising a mutation at position 917 of SEQ ID NO: 1, where * indicates a substitution mutation to any other amino acid. In a non-limiting example, BoNT/BIA1-F917R refers to the protease and transmembrane domain of BoNT/B fused with a BoNT/A1 modified receptor binding domain comprising a phenylalanine to arginine mutation at position 917 of SEQ ID NO: 1. This nomenclature is used in Table 8.

[0238] The modified BoNT polypeptides of the present disclosure (e.g., without limitation, polypeptides comprising amino acid sequence of any of SEQ ID NOs: 3-48 and 51-96), will generally be produced by expression form recombinant nucleic acids in appropriate cells (e.g., E. coli, or insect cells) and isolated. The nucleic acids encoding the polypeptides described herein may be obtained, and the nucleotide sequence of the nucleic acids determined, by any method known in the art.

[0239] Further provided herein are isolated and/or recombinant nucleic acids encoding any of the modified BoNT polypeptides disclosed herein. The nucleic acids encoding the isolated polypeptide fragments of the present disclosure, may be DNA or RNA, double-stranded or single stranded. In certain aspects, the subject nucleic acids encoding the isolated polypeptide fragments are further understood to include nucleic acids encoding polypeptides that are variants of any of the modified BoNT polypeptides described herein.

[0240] Variant nucleotide sequences include sequences that differ by one or more nucleotide substitutions, additions or deletions, such as allelic variants. In some embodiments, the isolated nucleic acid molecule of the present disclosure comprising a polynucleotide encoding a polypeptide comprising an amino acid sequence that has at least 85%, at least 86%, at least 87%, at least 88%, at least 89%, at least 90%, at least 91%, at least 92%, at least 93%, at least 94%, at least 95%, at least 96%, at least 97%, at least 98%, at least 99%, or at least 99.5% identity of any of SEQ ID NOs: 3-48 and 51-96. In some embodiments, the isolated nucleic acid molecule of the present disclosure comprising a polynucleotide encoding a polypeptide comprising an amino acid sequence that has 85%, 86%, 87%, 88%, 89%, 90%, 91%, 92%, 93%, 94%, 95%, 96%, 97%, 98%, 99%, or 100% identity of any of SEQ ID NOs: 3-48 and 51-96.

[0241] In some embodiments, the nucleic acid is comprised within a vector, such as an expression vector. In some embodiments, the vector comprises a promoter operably linked to the nucleic acid.

[0242] A variety of promoters can be used for expression of the polypeptides described herein, including, but not limited to, cytomegalovirus (CMV) intermediate early promoter, a viral LTR such as the Rous sarcoma virus LTR, HIV-LTR, HTLV-1 LTR, the simian virus 40 (SV40) early promoter, E. coli lac UV5 promoter, and the herpes simplex tk virus promoter. Regulatable promoters can also be used. Such regulatable promoters include those using the lac repressor from E. coli as a transcription modulator to regulate transcription from lac operator-bearing mammalian cell promoters [Brown, M. et al., Cell, 49:603-612 (1987)], those using the tetracycline repressor (tetR) [Gossen, M., and Bujard, H., Proc. Natl. Acad. Sci. USA 89:5547-5551 (1992); Yao, F. et al., Human Gene Therapy, 9:1939-1950 (1998); Shockelt, P., et al., Proc. Natl. Acad. Sci. USA, 92:6522-6526 (1995)].

[0243] Other systems include FK506 dimer, VP16 or p65 using astradiol, RU486, diphenol murislerone, or rapamycin. Inducible systems are available from Invitrogen, Clontech and Ariad. Regulatable promoters that include a repressor with the operon can be used. In one embodiment, the lac repressor from Escherichia coli can function as a transcriptional modulator to regulate transcription from lac operator-bearing mammalian cell promoters [M. Brown et al., Cell, 49:603-612 (1987)]; Gossen and Bujard (1992); [M. Gossen et al., Natl. Acad. Sci. USA, 89:5547-5551 (1992)] combined the tetracycline repressor (tetR) with the transcription activator (VP 16) to create a tetR-mammalian cell transcription activator fusion protein, tTa (tetR-VP 16), with the tetO-bearing minimal promoter derived from the human cytomegalovirus (hCMV) major immediate-early promoter to create a tetR-tet operator system to control gene expression in mammalian cells. In one embodiment, a tetracycline inducible switch is used (Yao et al., Human Gene Therapy; Gossen et al., Natl. Acad. Sci. USA, 89:5547-5551 (1992); Shockett et al., Proc. Natl. Acad. Sci. USA, 92:6522-6526 (1995)).

[0244] Additionally, the vector can contain, for example, some or all of the following: a selectable marker gene, such as the neomycin gene for selection of stable or transient transfectants in mammalian cells; enhancer/promoter sequences from the immediate early gene of human CMV for high levels of transcription; transcription termination and RNA processing signals from SV40 for mRNA stability; SV40 polyoma origins of replication and ColE1 for proper episomal replication; internal ribosome binding sites (IRESes), versatile multiple cloning sites; and T7 and SP6 RNA promoters for in vitro transcription of sense and antisense RNA. Suitable vectors and methods for producing vectors containing transgenes are well known and available in the art.

[0245] An expression vector comprising the nucleic acid can be transferred to a host cell by conventional techniques (e.g., electroporation, liposomal transfection, and calcium phosphate precipitation) and the transfected cells are then cultured by conventional techniques to produce the polypeptides described herein. In some embodiments, the expression of the polypeptides described herein is regulated by a constitutive, an inducible or a tissue-specific promoter.

[0246] The host cells used to express the isolated polypeptides described herein may be either bacterial cells such as Escherichia coli, or, preferably, eukaryotic cells. In particular, mammalian cells, such as Chinese hamster ovary cells (CHO), in conjunction with a vector such as the major intermediate early gene promoter element from human cytomegalovirus is an effective expression system for immunoglobulins (Foecking et al. (1986) “Powerful And Versatile Enhancer-Promoter Unit For Mammalian Expression Vectors,” Gene 45:101-106; Cockett et al. (1990) “High Level Expression Of Tissue Inhibitor Of Metalloproteinases In Chinese Hamster Ovary Cells Using Glutamine Synthetase Gene Amplification,” Biotechnology 8:662-667). A variety of host-expression vector systems may be utilized to express the isolated polypeptides described herein. Such host-expression systems represent vehicles by which the coding sequences of the isolate d polypeptides described herein may be produced and subsequently purified, but also represent cells which may, when transformed or transfected with the appropriate nucleotide coding sequences, express the isolated polypeptides described herein in situ. These include, but are not limited to, microorganisms such as bacteria (e.g., E. coli and B. subtilis) transformed with recombinant bacteriophage DNA, plasmid DNA or cosmid DNA expression vectors containing coding sequences for the isolated polypeptides described herein; yeast (e.g., Saccharomyces pichia) transformed with recombinant yeast expression vectors containing sequences encoding the isolated polypeptides described herein; insect cell systems infected with recombinant virus expression vectors (e.g., baclovirus) containing the sequences encoding the isolated polypeptides described herein; plant cell systems infected with recombinant virus expression vectors (e.g., cauliflower mosaic virus (CaMV) and tobacco mosaic virus (TMV) or transformed with recombinant plasmid expression vectors (e.g., Ti plasmid) containing sequences encoding the isolated polypeptides described herein; or mammalian cell systems (e.g., COS, CHO, BHK, 293, 293T, 3T3 cells, lymphotic cells (see U.S. Pat. No. 5,807,715), Per C.6 cells (human retinal cells developed by Crucell) harboring recombinant expression constructs containing promoters derived from the genome of mammalian cells (e.g., metallothionein promoter) or from mammalian viruses (e.g., the adenovirus late promoter; the vaccinia virus 7.5K promoter).

[0247] In bacterial systems, a number of expression vectors may be advantageously selected depending upon the use intended for the polypeptides being expressed. For example, when a large quantity of such a protein is to be produced, for the generation of pharmaceutical compositions of polypeptides described herein, vectors which direct the expression of high levels of fusion protein products that are readily purified may be desirable. Such vectors include, but are not limited, to the E. coli expression vector pUR278 (Rüther et al. (1983) “Easy Identification Of cDNA Clones,” EMBO J. 2:1791-1794), in which the coding sequence may be ligated individually into the vector in frame with the lac Z coding region so that a fusion protein is produced; pIN vectors (Inouye et al. (1985) “Up-Promoter Mutations In The 1pp Gene Of Escherichia coli,” Nucleic Acids Res. 13:3101-3110; Van Heeke et al. (1989) “Expression Of Human Asparagine Synthetase In Escherichia coli,” J. Biol. Chem. 24:5503-5509); and the like. pGEX vectors may also be used to express foreign polypeptides as fusion proteins with glutathione S-transferase (GST). In general, such fusion proteins are soluble and can easily be purified from lysed cells by adsorption and binding to a matrix glutathione-agarose beads followed by elution in the presence of free glutathione.

[0248] The pGEX vectors are designed to include thrombin or factor Xa protease cleavage sites so that the cloned target gene product can be released from the GST moiety. In an insect system, Autographa californica nuclear polyhedrosis virus (AcNPV) is used as a vector to express foreign genes. The virus grows in Spodoptera frugiperda cells. The coding sequence may be cloned individually into non-essential regions (e.g., the polyhedrin gene) of the virus and placed under control of an AcNPV promoter (e.g., the polyhedrin promoter).

[0249] In mammalian host cells, a number of viral-based expression systems may be utilized. In cases where an adenovirus is used as an expression vector, the coding sequence of interest may be ligated to an adenovirus transcription/translation control complex, e.g., the late promoter and tripartite leader sequence. This chimeric gene may then be inserted in the adenovirus genome by in vitro or in vivo recombination. Insertion in a non-essential region of the viral genome (e.g., region E1 or E3) will result in a recombinant virus that is viable and capable of expressing the immunoglobulin molecule in infected hosts (e.g., see Logan et al. (1984) “Adenovirus Tripartite Leader Sequence Enhances Translation Of mRNAs Late After Infection,” Proc. Natl. Acad. Sci. USA 81:3655-3659). Specific initiation signals may also be required for efficient translation of inserted antibody coding sequences. These signals include the ATG initiation codon and adjacent sequences. Furthermore, the initiation codon must be in phase with the reading frame of the desired coding sequence to ensure translation of the entire insert. These exogenous translational control signals and initiation codons can be of a variety of origins, both natural and synthetic.

[0250] The efficiency of expression may be enhanced by the inclusion of appropriate transcription enhancer elements, transcription terminators, etc. (see Bitter et al. (1987) “Expression And Secretion Vectors For Yeast,” Methods in Enzymol. 153:516-544). In addition, a host cell strain may be chosen which modulates the expression of the inserted sequences, or modifies and processes the gene product in the specific fashion desired. Such modifications (e.g., glycosylation) and processing (e.g., cleavage) of protein products may be important for the function of the protein. For example, in certain embodiments, the polypeptides described herein may be expressed as a single gene product (e.g., as a single polypeptide chain, i.e., as a polyprotein precursor), requiring proteolytic cleavage by native or recombinant cellular mechanisms to form separate polypeptides described herein.

[0251] The disclosure thus encompasses engineering a nucleic acid sequence to encode a polyprotein precursor molecule comprising the polypeptides described herein, which includes coding sequences capable of directing post translational cleavage of said polyprotein precursor. Post-translational cleavage of the polyprotein precursor results in the polypeptides described herein. The post translational cleavage of the precursor molecule comprising the polypeptides described herein may occur in vivo (i.e., within the host cell by native or recombinant cell systems/mechanisms, e.g. furin cleavage at an appropriate site) or may occur in vitro (e.g. incubation of said polypeptide chain in a composition comprising proteases or peptidases of known activity and/or in a composition comprising conditions or reagents known to foster the desired proteolytic action).

[0252] Purification and modification of recombinant proteins is well known in the art such that the design of the polyprotein precursor could include a number of embodiments readily appreciated by a skilled worker. Any known proteases or peptidases known in the art can be used for the described modification of the precursor molecule, e.g., thrombin or factor Xa (Nagai et al. (1985) “Oxygen Binding Properties Of Human Mutant Hemoglobins Synthesized In Escherichia coli,” Proc. Nat. Acad. Sci. USA 82:7252-7255, and reviewed in Jenny et al. (2003) “A Critical Review Of The Methods For Cleavage Of Fusion Proteins With Thrombin And Factor Xa,” Protein Expr. Purif. 31:1-11, each of which is incorporated by reference herein in its entirety)), enterokinase (Collins-Racie et al. (1995) “Production Of Recombinant Bovine Enterokinase Catalytic Subunit In Escherichia coli Using The Novel Secretory Fusion Partner DsbA,” Biotechnology 13:982-987 hereby incorporated by reference herein in its entirety)), furin, and AcTEV (Parks et al. (1994) “Release Of Proteins And Peptides From Fusion Proteins Using A Recombinant Plant Virus Proteinase,” Anal. Biochem. 216:413-417 hereby incorporated by reference herein in its entirety)) and the Foot and Mouth Disease Virus Protease C3.

[0253] Different host cells have characteristic and specific mechanisms for the post-translational processing and modification of proteins and gene products. Appropriate cell lines or host systems can be chosen to ensure the correct modification and processing of the foreign protein expressed. To this end, eukaryotic host cells which possess the cellular machinery for proper processing of the primary transcript, glycosylation, and phosphorylation of the gene product may be used. Such mammalian host cells include but are not limited to CHO, VERY, BHK, HeLa, COS, MDCK, 293, 293T, 3T3, WI38, BT483, Hs578T, HTB2, BT20 and T47D, CRL7030 and Hs578Bst.

[0254] For long-term, high-yield production of recombinant proteins, stable expression is preferred. For example, cell lines which stably express polypeptides described herein may be engineered. Rather than using expression vectors which contain viral origins of replication, host cells can be transformed with DNA controlled by appropriate expression control elements (e.g., promoter, enhancer, sequences, transcription terminators, polyadenylation sites, etc.), and a selectable marker. Following the introduction of the foreign DNA, engineered cells may be allowed to grow for 1-2 days in an enriched media, and then are switched to a selective media. The selectable marker in the recombinant plasmid confers resistance to the selection and allows cells to stably integrate the plasmid into their chromosomes and grow to form foci which in turn can be cloned and expanded into cell lines. This method may advantageously be used to engineer cell lines which express the polypeptides described herein. Such engineered cell lines may be particularly useful in screening and evaluation of polypeptides that interact directly or indirectly with the polypeptides described herein.

[0255] A number of selection systems may be used, including but not limited to the herpes simplex virus thymidine kinase (Wigler et al. (1977) “Transfer Of Purified Herpes Virus Thymidine Kinase Gene To Cultured Mouse Cells,” Cell 11: 223-232), hypoxanthine-guanine phosphoribosyltransferase (Szybalska et al. (1992) “Use Of The HPRT Gene And The HAT Selection Technique In DNA-Mediated Transformation Of Mammalian Cells First Steps Toward Developing Hybridoma Techniques And Gene Therapy,” Bioessays 14: 495-500), and adenine phosphoribosyltransferase (Lowy et al. (1980) “Isolation Of Transforming DNA: Cloning The Hamster aprt Gene,” Cell 22: 817-823) genes can be employed in tk-, hgprt- or aprt-cells, respectively. Also, antimetabolite resistance can be used as the basis of selection for the following genes: dhfr, which confers resistance to methotrexate (Wigler et al. (1980) “Transformation Of Mammalian Cells With An Amplifiable Dominant-Acting Gene,” Proc. Natl. Acad. Sci. USA 77:3567-3570; O'Hare et al. (1981) “Transformation Of Mouse Fibroblasts To Methotrexate Resistance By A Recombinant Plasmid Expressing A Prokaryotic Dihydrofolate Reductase,” Proc. Natl. Acad. Sci. USA 78: 1527-1531); gpt, which confers resistance to mycophenolic acid (Mulligan et al. (1981) “Selection For Animal Cells That Express The Escherichia coli Gene Coding For Xanthine-Guanine Phosphoribosyltransferase,” Proc. Natl. Acad. Sci. USA 78: 2072-2076); neo, which confers resistance to the aminoglycoside G-418 (Tolstoshev (1993) “Gene Therapy, Concepts, Current Trials And Future Directions,” Ann. Rev. Pharmacol. Toxicol. 32:573-596; Mulligan (1993) “The Basic Science Of Gene Therapy,” Science 260:926-932; and Morgan et al. (1993) “Human Gene Therapy,” Ann. Rev. Biochem. 62:191-217) and hygro, which confers resistance to hygromycin (Santerre et al. (1984) “Expression Of Prokaryotic Genes For Hygromycin B And G418 Resistance As Dominant-Selection Markers In Mouse L Cells,” Gene 30:147-156). Methods commonly known in the art of recombinant DNA technology which can be used are described in Ausubel et al. (eds.), 1993, Current Protocols in Molecular Biology, John Wiley & Sons, NY; Kriegler, 1990, Gene Transfer and Expression, A Laboratory Manual, Stockton Press, NY; and in Chapters 12 and 13, Dracopoli et al. (eds), 1994, Current Protocols in Human Genetics, John Wiley & Sons, NY.; Colberre-Garapin et al. (1981) “A New Dominant Hybrid Selective Marker For Higher Eukaryotic Cells,” J. Mol. Biol. 150:1-14.

[0256] The expression levels of polypeptides described herein can be increased by vector amplification (for a review, see Bebbington and Hentschel, The use of vectors based on gene amplification for the expression of cloned genes in mammalian cells in DNA cloning, Vol. 3 (Academic Press, New York, 1987). When a marker in the vector system expressing a polypeptide described herein is amplifiable, increase in the level of inhibitor present in culture of host cell will increase the number of copies of the marker gene. Since the amplified region is associated with the nucleotide sequence of a polypeptide described herein or a polypeptide described herein, production of the polypeptide will also increase (Crouse et al. (1983) “Expression And Amplification Of Engineered Mouse Dihydrofolate Reductase Minigenes,” Mol. Cell. Biol. 3:257-266).

[0257] Once a polypeptide described herein has been recombinantly expressed, it may be purified by any method known in the art for purification of polypeptides, polyproteins or antibodies (e.g., analogous to antibody purification schemes based on antigen selectivity) for example, by chromatography (e.g., ion exchange, affinity, particularly by affinity for the specific antigen (optionally after Protein A selection where the polypeptide comprises an Fc domain (or portion thereof)), and sizing column chromatography), centrifugation, differential solubility, or by any other standard technique for the purification of polypeptides or antibodies. Other aspects of the present disclosure relate to a cell comprising a nucleic acid described herein or a vector described herein.

[0258] The cell may be a prokaryotic or eukaryotic cell. In some embodiments, the cell in a mammalian cell. Exemplary cell types are described herein. Other aspects of the present disclosure related to a cell expressing the modified BoNT polypeptides described herein. The cell may be a prokaryotic or eukaryotic cell. In some embodiments, the cell in a mammalian cell. Exemplary cell types are described herein. The cell can be for propagation of the nucleic acid or for expression of the nucleic acid, or both. Such cells include, without limitation, prokaryotic cells including, without limitation, strains of aerobic, microaerophilic, capnophilic, facultative, anaerobic, gram-negative and gram-positive bacterial cells such as those derived from, e.g., Escherichia coli, Bacillus subtilis, Bacillus licheniformis, Bacteroides fragilis, Clostridia perfringens, Clostridia difficile, Caulobacter crescentus, Lactococcus lactis, Methylobacterium extorquens, Neisseria meningirulls, Neisseria meningitidis, Pseudomonas fluorescens and Salmonella typhimurium; and eukaryotic cells including, without limitation, yeast strains, such as, e.g., those derived from Pichia pastoris, Pichia methanolica, Pichia angusta, Schizosaccharomyces pombe, Saccharomyces cerevisiae and Yarrowia lipolytica; insect cells and cell lines derived from insects, such as, e.g., those derived from Spodoptera frugiperda, Trichoplusia ni, Drosophila melanogaster and Manduca sexta; and mammalian cells and cell lines derived from mammalian cells, such as, e.g., those derived from mouse, rat, hamster, porcine, bovine, equine, primate and human. Cell lines may be obtained from the American Type Culture Collection, European Collection of Cell Cultures and the German Collection of Microorganisms and Cell Cultures. Non-limiting examples of specific protocols for selecting, making and using an appropriate cell line are described in e.g., INSECT CELL CULTURE ENGINEERING (Mattheus F. A. Goosen et al. eds., Marcel Dekker, 1993); INSECT CELL CULTURES: FUNDAMENTAL AND APPLIED ASPECTS (J. M. Vlak et al. eds., Kluwer Academic Publishers, 1996); Maureen A. Harrison & Ian F. Rae, GENERAL TECHNIQUES OF CELL CULTURE (Cambridge University Press, 1997); CELL AND TISSUE CULTURE: LABORATORY PROCEDURES (Alan Doyle et al eds., John Wiley and Sons, 1998); R. Ian Freshney, CULTURE OF ANIMAL CELLS: A MANUAL OF BASIC TECHNIQUE (Wiley-Liss, 4.sup.th ed. 2000); ANIMAL CELL CULTURE: A PRACTICAL APPROACH (John R. W. Masters ed., Oxford University Press, 3.sup.rd ed. 2000); MOLECULAR CLONING A LABORATORY MANUAL, supra, (2001); BASIC CELL CULTURE: A PRACTICAL APPROACH (John M. Davis, Oxford Press, 2.sup.nd ed. 2002); and CURRENT PROTOCOLS IN MOLECULAR BIOLOGY, supra, (2004).

[0259] These protocols are routine procedures within the scope of one skilled in the art and from the teaching herein. Yet other aspects of the present disclosure relate to a method of producing a polypeptide described herein, the method comprising obtaining a cell described herein and expressing nucleic acid described herein in said cell. In some embodiments, the method further comprises isolating and purifying a polypeptide described herein.

[0260] In some embodiments, botulinum neurotoxin can be obtained by establishing and growing cultures of Clostridium botulinum in a fermenter and then harvesting and purifying the fermented mixture in accordance with known procedures. All the botulinum toxin serotypes are initially synthesized as inactive single chain proteins which must be cleaved or nicked by proteases to become neuroactive.

[0261] The bacterial strains that make botulinum toxin serotypes A and G possess endogenous proteases and serotypes A and G can therefore be recovered from bacterial cultures in predominantly their active form. In contrast, botulinum toxin serotypes Ci, D and E are synthesized by non-proteolytic strains and are therefore typically unactivated when recovered from culture. Serotypes B and F are produced by both proteolytic and non-proteolytic strains and therefore can be recovered in either the active or inactive form. The proteolytic strains that produce, for example, the botulinum toxin type A serotype may only cleave a portion of the toxin produced.

[0262] The exact proportion of nicked to un-nicked molecules depends on the length of incubation and the temperature of the culture. Therefore, a certain percentage of a preparation of, for example, the botulinum toxin type A toxin may be inactive. In one embodiment, the neurotoxin of the present disclosure is in an active state. In one embodiment, the neurotoxin is in an inactive state. In one embodiment, a combination of active and inactive neurotoxin is envisioned.

[0263] It is also envisioned that the modified receptor binding domain of BoNT/A1 or BoNT/A2 described here can be utilized as a delivery tool to target neurons in humans. For example, the modified receptor binding domain of BoNT/A1 or BoNT/A2 can be linked to other therapeutic agents, covalently or non-covalently, and acts as the targeting vehicle to deliver the therapeutic agents to neurons in humans.

[0264] As such, another aspect of the disclosure relates to a chimeric polypeptide molecule comprising a first portion that is a modified receptor binding domain of C. Botulinum serotype B, comprising one or more substitution mutation(s) which leads to significantly enhanced binding to neurons, linked to a second portion. The second portion of the molecule can be a bioactive molecule such as a therapeutic agent (e.g., a polypeptide or drug). Linkage of the first and second portions of the molecule can be covalent (e.g., in the form of a fusion protein) or non-covalent. Methods of such linkage are known in the art and can readily be applied by the skilled practitioner. When the second portion of the chimeric molecule is a polypeptide and the chimeric molecule is in the form of a protein, nucleic acids and nucleic acid vectors encoding such chimeric molecules are provided.

[0265] Also provided are cells comprising the nucleic acids or nucleic acid vectors, and cells expressing such chimeric molecules. The chimeric molecules in a fusion protein form may be expressed and isolated using the methods disclosed herein.

[0266] In some embodiments, such enhanced binding is also specific to a presynaptic nerve terminal. In some embodiments, the presynaptic nerve terminal is in a mammal. In some embodiments, the presynaptic nerve terminal is in a rodent. In some embodiments, the presynaptic nerve terminal is a mouse presynaptic nerve terminal. In some embodiments, the presynaptic nerve terminal is a mouse presynaptic nerve terminal. In some embodiments, the presynaptic nerve terminal is a human presynaptic nerve terminal.

[0267] A modified BoNT polypeptide that has enhanced binding affinity to its target cells (e.g., neurons) affords potential for therapeutic use. For example, such modified BoNT polypeptide may be effective at a lower dose. A lower BoNT dose for therapeutic use is generally desirable because less toxin will diffuse to surrounding tissues at the injection site and less neutralizing antibodies may be generated against the BoNT.

[0268] Thus, the present disclosure also contemplates pharmaceutically compositions comprising the modified BoNTs or the chimeric molecules of the present disclosure. As it may also become clear later in the present disclosure, the pharmaceutical composition of the present disclosure, may further comprise other therapeutic agents suitable for the specific disease such composition is designed to treat. In some embodiments, the pharmaceutically composition of the present disclosure further comprises pharmaceutically-acceptable carriers.

[0269] The term “pharmaceutically-acceptable carrier”, as used herein, means a pharmaceutically-acceptable material, composition or vehicle, such as a liquid or solid filler, diluent, excipient, manufacturing aid (e.g., lubricant, talc magnesium, calcium or zinc stearate, or steric acid), or solvent encapsulating material, involved in carrying or transporting the polypeptide from one site (e.g., the delivery site) of the body, to another site (e.g., organ, tissue or portion of the body).

[0270] A pharmaceutically acceptable carrier is “acceptable” in the sense of being compatible with the other ingredients of the formulation and not injurious to the tissue of the subject (e.g., physiologically compatible, sterile, physiologic pH, etc.). Some examples of materials which can serve as pharmaceutically-acceptable carriers include: (1) sugars, such as lactose, glucose and sucrose; (2) starches, such as corn starch and potato starch; (3) cellulose, and its derivatives, such as sodium carboxymethylcellulose, methylcellulose, ethyl cellulose, microcrystalline cellulose and cellulose acetate; (4) powdered tragacanth; (5) malt; (6) gelatin; (7) lubricating agents, such as magnesium stearate, sodium lauryl sulfate and talc; (8) excipients, such as cocoa butter and suppository waxes; (9) oils, such as peanut oil, cottonseed oil, safflower oil, sesame oil, olive oil, corn oil and soybean oil; (10) glycols, such as propylene glycol; (11) polyols, such as glycerin, sorbitol, mannitol and polyethylene glycol (PEG); (12) esters, such as ethyl oleate and ethyl laurate; (13) agar; (14) buffering agents, such as magnesium hydroxide and aluminum hydroxide; (15) alginic acid; (16) pyrogen-free water; (17) isotonic saline; (18) Ringer's solution; (19) ethyl alcohol; (20) pH buffered solutions; (21) polyesters, polycarbonates and/or polyanhydrides; (22) bulking agents, such as polypeptides and amino acids (23) serum component, such as serum albumin, HDL and LDL; (22) C2-C12 alcohols, such as ethanol; and (23) other non-toxic compatible substances employed in pharmaceutical formulations. Wetting agents, coloring agents, release agents, coating agents, sweetening agents, flavoring agents, perfuming agents, preservative and antioxidants can also be present in the formulation. The terms such as “excipient”, “carrier”, “pharmaceutically acceptable carrier” or the like are used interchangeably herein. In some embodiments, a modified BoNT polypeptide of the present disclosure in a composition is administered by injection, by means of a catheter, by means of a suppository, or by means of an implant, the implant being of a porous, non-porous, or gelatinous material, including a membrane, such as a sialastic membrane, or a fiber.

[0271] Typically, when administering the composition, materials to which the polypeptide of the disclosure does not absorb are used. In other embodiments, the modified BoNT polypeptides of the present disclosure are delivered in a controlled release system. Such compositions and methods for administration are provides in U.S. Patent publication No. 2007/0020295, the contents of which are herein incorporated by reference. In one embodiment, a pump may be used (see, e.g., Langer, 1990, Science 249:1527-1533; Sefton, 1989, CRC Crit. Ref. Biomed. Eng. 14:201; Buchwald et al., 1980, Surgery 88:507; Saudek et al., 1989, N. Engl. J. Med. 321:574). In another embodiment, polymeric materials can be used. (See, e.g., Medical Applications of Controlled Release (Langer and Wise eds., CRC Press, Boca Raton, Fla., 1974); Controlled Drug Bioavailability, Drug Product Design and Performance (Smolen and Ball eds., Wiley, New York, 1984); Ranger and Peppas, 1983, Macromol. Sci. Rev. Macromol. Chem. 23:61. See also Levy et al., 1985, Science 228:190; During et al., 1989, Ann. Neurol. 25:351; Howard et al., 1989, J. Neurosurg. 71:105.) Other controlled release systems are discussed, for example, in Langer, supra.

[0272] The modified BoNT polypeptides of the present disclosure can be administered as pharmaceutical compositions comprising a therapeutically effective amount of a binding agent and one or more pharmaceutically compatible ingredients. In typical embodiments, the pharmaceutical composition is formulated in accordance with routine procedures as a pharmaceutical composition adapted for intravenous or subcutaneous administration to a subject, e.g., a human being.

[0273] Typically, compositions for administration by injection are solutions in sterile isotonic aqueous buffer. Where necessary, the pharmaceutical can also include a solubilizing agent and a local anesthetic such as lignocaine to ease pain at the site of the injection. Generally, the ingredients are supplied either separately or mixed together in unit dosage form, for example, as a dry lyophilized powder or water free concentrate in a hermetically sealed container such as an ampoule or sachette indicating the quantity of active agent. Where the pharmaceutical is to be administered by infusion, it can be dispensed with an infusion bottle containing sterile pharmaceutical grade water or saline. Where the pharmaceutical is administered by injection, an ampoule of sterile water for injection or saline can be provided so that the ingredients can be mixed prior to administration. A pharmaceutical composition for systemic administration may be a liquid, e.g., sterile saline, lactated Ringer's or Hank's solution. In addition, the pharmaceutical composition can be in solid forms and re-dissolved or suspended immediately prior to use. Lyophilized forms are also contemplated. The pharmaceutical composition can be contained within a lipid particle or vesicle, such as a liposome or microcrystal, which is also suitable for parenteral administration. The particles can be of any suitable structure, such as unilamellar or plurilamellar, so long as compositions are contained therein.

[0274] The polypeptides of the present disclosure can be entrapped in ‘stabilized plasmid-lipid particles’ (SPLP) containing the fusogenic lipid dioleoylphosphatidylethanolamine (DOPE), low levels (5-10 mol %) of cationic lipid, and stabilized by a polyethyleneglycol (PEG) coating (Zhang Y. P. et al., Gene Ther. 1999, 6:1438-47). Positively charged lipids such as N-[1-(2,3-dioleoyloxi)propyl]-N,N,N-trimethyl-amoniummethylsulfate, or “DOTAP,” are particularly preferred for such particles and vesicles. The preparation of such lipid particles is well known. See, e.g., U.S. Pat. Nos. 4,880,635; 4,906,477; 4,911,928; 4,917,951; 4,920,016; and 4,921,757. The pharmaceutical compositions of the present disclosure may be administered or packaged as a unit dose, for example.

[0275] The term “unit dose” when used in reference to a pharmaceutical composition of the present disclosure refers to physically discrete units suitable as unitary dosage for the subject, each unit containing a predetermined quantity of active material calculated to produce the desired therapeutic effect in association with the required diluent; i.e., carrier, or vehicle. In some embodiments, the modified BoNT polypeptides described herein may be conjugated to a therapeutic moiety, e.g., an antibiotic. Techniques for conjugating such therapeutic moieties to polypeptides, including e.g., Fc domains, are well known; see, e.g., Amon et al., “Monoclonal Antibodies For Immunotargeting Of Drugs In Cancer Therapy”, in Monoclonal Antibodies And Cancer Therapy, Reisfeld et al. (eds.), 1985, pp. 243-56, Alan R. Liss, Inc.); Hellstrom et al., “Antibodies For Drug Delivery”, in Controlled Drug Delivery (2nd Ed.), Robinson et al. (eds.), 1987, pp. 623-53, Marcel Dekker, Inc.); Thorpe, “Antibody Carriers Of Cytotoxic Agents In Cancer Therapy: A Review”, in Monoclonal Antibodies '84: Biological And Clinical Applications, Pinchera et al. (eds.), 1985, pp. 475-506); “Analysis, Results, And Future Prospective Of The Therapeutic Use Of Radiolabeled Antibody In Cancer Therapy”, in Monoclonal Antibodies For Cancer Detection And Therapy, Baldwin et al. (eds.), 1985, pp. 303-16, Academic Press; and Thorpe et al. (1982) “The Preparation And Cytotoxic Properties Of Antibody-Toxin Conjugates,” Immunol. Rev., 62:119-158. Further, the pharmaceutical composition can be provided as a pharmaceutical kit comprising (a) a container containing a polypeptide of the disclosure in lyophilized form and (b) a second container containing a pharmaceutically acceptable diluent (e.g., sterile water) for injection. The pharmaceutically acceptable diluent can be used for reconstitution or dilution of the lyophilized polypeptide of the disclosure. Optionally associated with such container(s) can be a notice in the form prescribed by a governmental agency regulating the manufacture, use or sale of pharmaceuticals or biological products, which notice reflects approval by the agency of manufacture, use or sale for human administration. In another aspect, an article of manufacture containing materials useful for the treatment of the diseases described above is included. In some embodiments, the article of manufacture comprises a container and a label.

[0276] Suitable containers include, for example, bottles, vials, syringes, and test tubes. The containers may be formed from a variety of materials such as glass or plastic. In some embodiments, the container holds a composition that is effective for treating a disease described herein and may have a sterile access port. For example, the container may be an intravenous solution bag or a vial having a stopper pierceable by a hypodermic injection needle. The active agent in the composition is an isolated polypeptide of the disclosure. In some embodiments, the label on or associated with the container indicates that the composition is used for treating the disease of choice. The article of manufacture may further comprise a second container comprising a pharmaceutically-acceptable buffer, such as phosphate-buffered saline, Ringer's solution, or dextrose solution. It may further include other materials desirable from a commercial and user standpoint, including other buffers, diluents, filters, needles, syringes, and package inserts with instructions for use.

[0277] The modified BoNT polypeptides, the chimeric molecules, and the pharmaceutical compositions of the present disclosure may be used for the treatment of conditions associated with unwanted neuronal activities. Thus, further provided herein are methods of treating a condition associated with unwanted neuronal activity, the method comprising administering a therapeutically effective amount of the modified BoNT polypeptide, the chimeric molecule, or the pharmaceutical composition described herein to thereby treat the condition. In some embodiments, the modified BoNT polypeptides, the chimeric molecules, and the pharmaceutic compositions of the present disclosure contact one or more neuron(s) exhibiting unwanted neuronal activity,

[0278] Condition typically treated with a neurotoxin (e.g., skeletal muscle conditions, smooth muscle conditions, glandular conditions, a neuromuscular disorder, an autonomic disorder, pain, or an aesthetic/cosmetic condition) are associated with unwanted neuronal activity, as determined by the skilled practitioner. Administration is by a route that contacts an effective amount of the composition to neurons exhibiting the unwanted activity. In some embodiments, the condition may be associated with overactive neurons or glands. Specific conditions envisioned for treatment by the methods discussed herein include, without limitation, spasmodic dysphonia, spasmodic torticollis, laryngeal dystonia, oromandibular dysphonia, lingual dystonia, cervical dystonia, focal hand dystonia, blepharospasm, strabismus, hemifacial spasm, eyelid disorder, cerebral palsy, focal spasticity and other voice disorders, spasmodic colitis, neurogenic bladder, anismus, limb spasticity, tics, tremors, bruxism, anal fissure, achalasia, dysphagia and other muscle tone disorders and other disorders characterized by involuntary movements of muscle groups, lacrimation, hyperhydrosis, excessive salivation, excessive gastrointestinal secretions as well as other secretory disorders, pain from muscle spasms, headache pain. In addition, the present disclosure can be used to treat dermato logical or aesthetic/cosmetic conditions, for example, reduction of brow furrows, reduction of skin wrinkles.

[0279] The present disclosure can also be used in the treatment of sports injuries. Borodic U.S. Pat. No. 5,053,005 discloses methods for treating juvenile spinal curvature, i.e. scoliosis, using botulinum type A. The disclosure of Borodic is incorporated in its entirety herein by reference. In one embodiment, using substantially similar methods as disclosed by Borodic, a modified neurotoxin can be administered to a mammal, preferably a human, to treat spinal curvature. In a suitable embodiment, a modified neurotoxin comprising botulinum type E fused with a leucine-based motif is administered. Even more preferably, a modified neurotoxin comprising botulinum type A-E with a leucine-based motif fused to the carboxyl terminal of its light chain is administered to the mammal, preferably a human, to treat spinal curvature.

[0280] In addition, the modified neurotoxin can be administered to treat other neuromuscular disorders using well known techniques that are commonly performed with botulinum type A. For example, the present disclosure can be used to treat pain, for example, headache pain, pain from muscle spasms and various forms of inflammatory pain. For example, Aoki U.S. Pat. No. 5,721,215 and Aoki U.S. Pat. No. 6,113,915 disclose methods of using botulinum toxin type A for treating pain. The disclosure of these two patents is incorporated in its entirety herein by reference.

[0281] Autonomic nervous system disorders can also be treated with a modified neurotoxin. For example, glandular malfunctioning is an autonomic nervous system disorder. Glandular malfunctioning includes excessive sweating and excessive salivation. Respiratory malfunctioning is another example of an autonomic nervous system disorder. Respiratory malfunctioning includes chronic obstructive pulmonary disease and asthma. Sanders et al. disclose methods for treating the autonomic nervous system; for example, treating autonomic nervous system disorders such as excessive sweating, excessive salivation, asthma, etc., using naturally existing botulinum toxins. The disclosure of Sander et al. is incorporated in its entirety by reference herein.

[0282] In one embodiment, substantially similar methods to that of Sanders et al. can be employed, but using a modified neurotoxin, to treat autonomic nervous system disorders such as the ones discussed above. For example, a modified neurotoxin can be locally applied to the nasal cavity of the mammal in an amount sufficient to degenerate cholinergic neurons of the autonomic nervous system that control the mucous secretion in the nasal cavity. Pain that can be treated by a modified neurotoxin includes pain caused by muscle tension, or spasm, or pain that is not associated with muscle spasm. For example, Binder in U.S. Pat. No. 5,714,468 discloses that headache caused by vascular disturbances, muscular tension, neuralgia and neuropathy can be treated with a naturally occurring botulinum toxin, for example Botulinum type A. The disclosures of Binder are incorporated in its entirety herein by reference.

[0283] In one embodiment, substantially similar methods to that of Binder can be employed, but using a modified neurotoxin, to treat headache, especially the ones caused by vascular disturbances, muscular tension, neuralgia and neuropathy. Pain caused by muscle spasm can also be treated by an administration of a modified neurotoxin. For example, a botulinum type E fused with a leucine-based motif, preferably at the carboxyl terminal of the botulinum type E light chain, can be administered intramuscularly at the pain/spasm location to alleviate pain. Furthermore, a modified neurotoxin can be administered to a mammal to treat pain that is not associated with a muscular disorder, such as spasm.

[0284] In one broad embodiment, methods of the present disclosure to treat non-spasm related pain include central administration or peripheral administration of the modified neurotoxin. For example, Foster et al. in U.S. Pat. No. 5,989,545 discloses that a botulinum toxin conjugated with a targeting moiety can be administered centrally (intrathecally) to alleviate pain. The disclosures of Foster et al. are incorporated in its entirety by reference herein.

[0285] In one embodiment, substantially similar methods to that of Foster et al. can be employed, but using the compositions described herein to treat pain. The pain to be treated can be an acute pain or chronic pain. An acute or chronic pain that is not associated with a muscle spasm can also be alleviated with a local, peripheral administration of the modified neurotoxin to an actual or a perceived pain location on the mammal.

[0286] In one embodiment, the modified neurotoxin is administered subcutaneously at or near the location of pain, for example, at or near a cut. In some embodiments, the modified neurotoxin is administered intramuscularly at or near the location of pain, for example, at or near a bruise location on the mammal. In some embodiments, the modified BoNT polypeptide is injected directly into a joint of a mammal, for treating or alleviating pain caused by arthritic conditions. Also, frequent repeated injection or infusion of the modified neurotoxin to a peripheral pain location is within the scope of the present disclosure. Routes of administration for such methods are known in the art and easily adapted to the methods described herein by the skilled practitioner (e.g., see for example, Harrison's Principles of Internal Medicine (1998), edited by Anthony Fauci et al., 14.sup.th edition, published by McGraw Hill).

[0287] By way of non-limiting example, the treatment of a neuromuscular disorder can comprise a step of locally administering an effective amount of the molecule to a muscle or a group of muscles, the treatment of an autonomic disorder can comprise a step of locally administering an effective of the molecule to a gland or glands, and the treatment of pain can comprise a step of administering an effective amount of the molecule the site of the pain. In addition, the treatment of pain can comprise a step of administering an effective amount of a modified neurotoxin to the spinal cord.

[0288] “A therapeutically effective amount” as used herein refers to the amount of each therapeutic agent of the present disclosure required to confer therapeutic effect on the subject, either alone or in combination with one or more other therapeutic agents. Effective amounts vary, as recognized by those skilled in the art, depending on the particular condition being treated, the severity of the condition, the individual subject parameters including age, physical condition, size, gender and weight, the duration of the treatment, the nature of concurrent therapy (if any), the specific route of administration and like factors within the knowledge and expertise of the health practitioner. These factors are well known to those of ordinary skill in the art and can be addressed with no more than routine experimentation. It is generally preferred that a maximum dose of the individual components or combinations thereof be used, that is, the highest safe dose according to sound medical judgment. It will be understood by those of ordinary skill in the art, however, that a subject may insist upon a lower dose or tolerable dose for medical reasons, psychological reasons or for virtually any other reasons. Empirical considerations, such as the half-life, generally will contribute to the determination of the dosage. For example, therapeutic agents that are compatible with the human immune system, such as polypeptides comprising regions from humanized antibodies or fully human antibodies, may be used to prolong half-life of the polypeptide and to prevent the polypeptide being attacked by the host's immune system.

[0289] Frequency of administration may be determined and adjusted over the course of therapy, and is generally, but not necessarily, based on treatment and/or suppression and/or amelioration and/or delay of a disease. Alternatively, sustained continuous release formulations of a polypeptide may be appropriate. Various formulations and devices for achieving sustained release are known in the art. In some embodiments, dosage is daily, every other day, every three days, every four days, every five days, or every six days. In some embodiments, dosing frequency is once every week, every 2 weeks, every 4 weeks, every 5 weeks, every 6 weeks, every 7 weeks, every 8 weeks, every 9 weeks, or every 10 weeks; or once every month, every 2 months, or every 3 months, or longer. The progress of this therapy is easily monitored by conventional techniques and assays.

[0290] The dosing regimen (including the polypeptide used) can vary over time. In some embodiments, for an adult subject of normal weight, doses ranging from about 0.01 to 1000 mg/kg may be administered. In some embodiments, the dose is between 1 to 200 mg. The particular dosage regimen, i.e., dose, timing and repetition, will depend on the particular subject and that subject's medical history, as well as the properties of the polypeptide (such as the half-life of the polypeptide, and other considerations well known in the art).

[0291] For the purpose of the present disclosure, the appropriate dosage of a therapeutic agent as described herein will depend on the specific agent (or compositions thereof) employed, the formulation and route of administration, the type and severity of the disease, whether the polypeptide is administered for preventive or therapeutic purposes, previous therapy, the subject's clinical history and response to the antagonist, and the discretion of the attending physician. Typically the clinician will administer a polypeptide until a dosage is reached that achieves the desired result.

[0292] Administration of one or more polypeptides can be continuous or intermittent, depending, for example, upon the recipient's physiological condition, whether the purpose of the administration is therapeutic or prophylactic, and other factors known to skilled practitioners. The administration of a polypeptide may be essentially continuous over a preselected period of time or may be in a series of spaced dose, e.g., either before, during, or after developing a disease. As used herein, the term “treating” refers to the application or administration of a polypeptide or composition including the polypeptide to a subject in need thereof.

[0293] “A subject in need thereof”, refers to an individual who has a disease, a symptom of the disease, or a predisposition toward the disease, with the purpose to cure, heal, alleviate, relieve, alter, remedy, ameliorate, improve, or affect the disease, the symptom of the disease, or the predisposition toward the disease. In some embodiments, the subject has CDI. In some embodiments, the subject has cancer. In some embodiments, the subject is a mammal. In some embodiments, the subject is a non-human primate. In some embodiments, the subject is human. Alleviating a disease includes delaying the development or progression of the disease, or reducing disease severity. Alleviating the disease does not necessarily require curative results.

[0294] As used therein, “delaying” the development of a disease means to defer, hinder, slow, retard, stabilize, and/or postpone progression of the disease. This delay can be of varying lengths of time, depending on the history of the disease and/or individuals being treated. A method that “delays” or alleviates the development of a disease, or delays the onset of the disease, is a method that reduces probability of developing one or more symptoms of the disease in a given time frame and/or reduces extent of the symptoms in a given time frame, when compared to not using the method. Such comparisons are typically based on clinical studies, using a number of subjects sufficient to give a statistically significant result.

[0295] “Development” or “progression” of a disease means initial manifestations and/or ensuing progression of the disease. Development of the disease can be detectable and assessed using standard clinical techniques as well known in the art. However, development also refers to progression that may be undetectable. For purpose of this disclosure, development or progression refers to the biological course of the symptoms. “Development” includes occurrence, recurrence, and onset.

[0296] As used herein “onset” or “occurrence” of a disease includes initial onset and/or recurrence. Conventional methods, known to those of ordinary skill in the art of medicine, can be used to administer the isolated polypeptide or pharmaceutical composition to the subject, depending upon the type of disease to be treated or the site of the disease. This composition can also be administered via other conventional routes, e.g., administered orally, parenterally, by inhalation spray, topically, rectally, nasally, buccally, vaginally or via an implanted reservoir.

[0297] The term “parenteral” as used herein includes subcutaneous, intracutaneous, intravenous, intramuscular, intraarticular, intraarterial, intrasynovial, intrasternal, intrathecal, intralesional, and intracranial injection or infusion techniques. In addition, it can be administered to the subject via injectable depot routes of administration such as using 1-, 3-, or 6-month depot injectable or biodegradable materials and methods.

[0298] As used herein, a “subject” refers to a human or animal. Usually the animal is a vertebrate such as a primate, rodent, domestic animal or game animal. Primates include chimpanzees, cynomologous monkeys, spider monkeys, and macaques, e.g., Rhesus. Rodents include mice, rats, woodchucks, ferrets, rabbits and hamsters. Domestic and game animals include cows, horses, pigs, deer, bison, buffalo, feline species, e.g., domestic cat, canine species, e.g., dog, fox, wolf, avian species, e.g., chicken, emu, ostrich, and fish, e.g., trout, catfish and salmon. Patient or subject includes any subset of the foregoing, e.g., all of the above, but excluding one or more groups or species such as humans, primates or rodents. In certain embodiments of the aspects described herein, the subject is a mammal, e.g., a primate, e.g., a human.

[0299] The terms, “patient” and “subject” are used interchangeably herein. A subject can be male or female. A subject can be a fully developed subject (e.g., an adult) or a subject undergoing the developmental process (e.g., a child, infant or fetus). Preferably, the subject is a mammal. The mammal can be a human, non-human primate, mouse, rat, dog, cat, horse, or cow, but are not limited to these examples. Mammals other than humans can be advantageously used as subjects that represent animal models of disorders associated with unwanted neuronal activity. In addition, the methods and compositions described herein can be used to treat domesticated animals and/or pets.

### Examples

[0300] Botulinum neurotoxins are a family of bacterial toxins, including seven major serotypes (BoNT/A-G) ^{1, 2} and recently discovered BoNT/EN and BoNT/X. These toxins act by blocking neurotransmitter release from neurons, thus paralyzing animals and humans. In recent years, BoNTs have been widely used to treat a growing list of medical conditions: local injections of minute amount of toxins can attenuate neuronal activity in targeted regions, which can be beneficial in many medical conditions as well as for cosmetic purposes ³⁻⁵.

[0301] BoNT/A and BoNT/B are the only two BoNTs that are currently FDA-approved for use in humans ³⁻⁵. These are toxins purified from bacteria without any sequence modifications (defined as wild type, WT). As the application of BoNTs grows, limitations and adverse effects have been reported. The major limitation is the generation of neutralizing antibodies in patients, which renders future treatment ineffective ⁶. Termination of BoNT usage often leaves patients with no other effective ways to treat or relieve their disorders. The probability of antibody responses is directly related to both toxin doses and the frequency of injection ⁶. Therefore, this limitation mainly occurs in treating muscle spasms, which involves high dose of toxins.

[0302] The observed adverse effects of BoNTs are largely due to diffusion of toxins to other regions of the body and the possibility of toxin diffusion is directly related to injected doses. The adverse effects range from transient non-serious events such as ptosis and diplopia to life-threatening events even death ^{7, 8}. In a petition letter filed in 2008 by Dr. Sidney Wolfe to FDA, a total of 180 serious adverse events, including 16 deaths have been documented. As a result, FDA now requires the “Black box warning” on all BoNT products, highlighting the risk of the spread of toxins, following similar warnings issued by the European Union.

[0303] Because both the generation of neutralizing antibodies and toxin diffusion are directly related to injected doses, lowering toxin doses (while maintaining the same levels of toxin activity) is highly desired, which means the efficacy of individual toxin molecules to induce local muscle paralysis has to be enhanced. Such modified BoNTs with improved local efficacy will also reduce any potential off-target effects due to toxin diffusion to other regions.

[0304] BoNTs have a three-step mechanism (FIG. 1A): (1) receptor binding: these toxins target motor nerve terminals by first binding specifically to their receptors expressed in neurons; (2) translocation: after binding to receptors, BoNTs enter cells via receptor-mediated endocytosis into endosomes, and the low pH conditions within endosomes then induce conformational changes of toxin, resulting in its penetration of endosomal membrane and release of its protease domain into the cytosol of neurons; (3) substrate cleavage: within the cytosol of neurons, the released protease domain of BoNTs then cleave proteins required for synaptic transmission, therefore blocking neurotransmission 2. Corresponding to these three steps of action, BoNTs are composed of three functional domains (FIG. 1B) 2: (1) the C-terminal receptor-binding domain (H_{C}, ˜50 kDa); (2) the membrane translocation domain in the middle (H_{N}, ˜50 kDa); (3) the N-terminal protease domain (also known as light chain, LC, ˜50 kDa). The H_{C} and H_{N} together forms the heavy chain (HC, ˜100 kDa).

[0305] Receptor-binding appears to be a rate-limiting step. For instance, enhancing the ability of BoNTs to recognize their neuronal receptors will facilitate absorbance of toxins into neurons at the injection site, therefore shielding toxins from triggering immune responses and also preventing their diffusion. Enhanced affinity and specificity to neuronal receptors will also reduce potential off-target effects due to non-specific entry into other cell types. The receptors for most BoNTs have been identified in recent years. BoNT/B, G, and a mosaic toxin DC share two homologous synaptic vesicle proteins synaptotagmin I and II (Syt I/II) as their receptors ⁹⁻¹⁶. Another family of synaptic vesicle protein SV2 acts as receptors for BoNT/A, E, D, and potentially F ^{10, 17-22}. In addition to protein receptors, all BoNTs require lipid co-receptor gangliosides, which are abundant on neuronal surfaces ²³.

[0306] Recent progresses in genomic sequencing revealed that there are a growing number of subtype sequences within each major serotype of BoNTs ²⁴. For instance, BoNT/A currently contains at least 8 subtypes (A1-A8), with a total of 37 distinct sequences (bontbase.org). There are as much as 15% differences at protein levels among these subtypes. These differences may not alter the receptor or basic function of the toxin, but may have significant impacts on binding affinity to receptors, translocation efficacy, protein stability in serum, etc. For example, BoNT/A2 has been shown to have a higher level of efficacy on cultured neurons compared with the standard BoNT/A1 (which is BOTOX®) ²⁵. Therefore, they offer a vast resource to explore residue changes that may improve the overall efficacy of a toxin. However, these residue changes occurred randomly in nature. Although some of the changes are beneficial for the toxin and improving its efficacy, many other residue changes may simultaneously reduce the efficacy of the toxin.

[0307] Presented herein is a consensus mutagenesis approach wherein all available BoNT/A subtype sequences were compared, and the most commonly appearing residues at a certain position within the H_{C} were selected, with the assumption that these residues were optimal for that position as it was preserved in most BoNT/A sequences. Second, available H_{C} of BoNT/A1 (H_{C}/A1) complex with its receptor glycosylated SV2 26 was used to design specific mutations aiming to enhance binding of H_{C}/A1 to glycosylated SV2.

### Rational Design of Consensus Mutagenesis of H_{C}/A1.

[0308] First, H_{C}/A1 sequences were compared with all other BoNT/A subtypes (A1-A8). The H_{C} of BoNT/HA, a recently discovered chimeric toxin containing a H_{C} with over 80% identity with A1, was also included (FIG. 2A) ²⁷. From this sequence comparison, a total of 23 positions (FIG. 2A and Table 1) were identified based on a residue with distinct properties that appeared in other subtypes compared with A1.

TABLE 1
Mostly conserved residues in A subtypes, but not in A1.

| Sequence in A1 | Major in other subtypes |
|---|---|
| R948 | K |
| N954 | S |
| S955 | K |
| S957 | N |
| M968 | I |
| T990 | N |
| Q991 | K |
| E992 | Q |
| I993 | N |
| K994 | I |
| I1005 | V |
| N1025 | T |
| N1026 | K |
| N1052 | K |
| T1063 | P |
| H1064 | R |
| R1156 | M |
| T1232 | R |
| E1272 | G |
| R1273 | K |
| L1278 | F |
| R1294 | S |
| P1295 | S |

[0309] Among these 23 positions, 17 positions were selected for experimental validation based on their high frequency appearing in multiple subtypes and also excluding the ones with similar residues (e.g. R versus K) (marked with boxes in FIG. 2A, Table 2). A few of these residues are next to each other and they were mutated at the same time. In total, nine mutants were selected (Table 2). The location of these 17 mutation sites were marked in the structure of HC/A (FIG. 2B).

TABLE 2
Selected 9 consensus mutants for evaluation

| Consensus mutations | Mimicking subtypes |
|---|---|
| N954S/S955K/S957N | A2, A3, A5, A7, A8 |
| T990N/Q991K/E992Q/I993N/K994I | A2, A3, A5, A6, A8 |
| N1025T/N1026K | A2, A3, A4, A6, A7 |
| T1063P/H1064R | A2, A3, A6, A8 |
| R1156M | A3, A4, A5, A6, A7, A8, H |
| T1232R | A2, A3, A5, A6, A7, A8, H |
| L1278F | A2, A3, A5, A6, A8, H |
| R1294S/P1295S | A2, A3, A7, A8, H |

### Rationale Design of H_{C}/A1 Mutations to Enhance Binding to Glycosylated SV2

[0310] The co-crystal structure of H_{C}/A1 in complex with glycosylated human SV2C shows that H_{C}/A1 binds to mainly the N-linked glycan via extensive contacts (FIG. 3) ²⁶. The protein-protein interactions between H_{C}/A1 and SV2C are mainly through backbone to backbone interactions, which lack the specificity of side-chain mediated interactions. Therefore, the binding to the N-linked glycan was enhanced by altering key residues that formed contacts with the glycan. A total of 19 mutations were designed (FIG. 3, Table 3).

TABLE 3
Designed mutations for enhancing glycan binding
Mutations for glycan binding

F917R
F917K
F953H
F953Y
N954Q
S957Q
S957Y
D1062E
T1063P
H1064Q
R1065N
Y1066R
Y1066K
T1145Y
D1288E
D1288N
D1289Y
G1292R
G1292K

[0311] Seven mutation of the mutations in Table 3 were selected for experimental validation because they contained natural variations at these positions among BoNT/A subtypes (Table 4).

TABLE 4
Evaluated mutations for glycan binding variants
Mutations for glycan binding

F917R
F917K
N954Q
S957Q
T1063P
H1064Q
D1289Y

### Experimental Validation of BoNT/A1 Mutations

[0312] The selected mutations were evaluated to determine whether they would enhance or alter the overall efficacy of BoNT/A1 over the natural form in vivo. To ensure biosafety, cDNA sequences that encoded full-length toxin were not produced and live organisms that could harbor the full toxin gene were not developed. Instead, a sortase-mediated ligation method was used (FIG. 4A) ^{28, 29}. This method relied on producing two separated pieces of BoNTs: the LC-H_{N} fragment with a sortase recognition site at the C-terminus; and the H_{C} with a free glycine at its N-terminus. Each piece alone was not toxic. Then, the two proteins were ligated together biochemically by adding sortase, a bacterial transpeptidase, which recognizes the sortase tag (LPETG) and ligates it to the glycine at the N-terminal of H_{C}, thus producing a full-length toxin protein, without ever having the coding sequence for the full-length toxin. As a result, the amount of toxins produced in the test tube could be precisely controlled to ensure that the total amount was below the exempted amount for BoNTs (<1 mg).

[0313] Wild type (WT) H_{C}/A1 and mutant H_{C}/A1 proteins containing point mutations described in Table 2 and Table 4 were produced in E. coli, and then ligated to the same LC-HN/A1 fragment derived from BoNT/A1, generating full toxins at ˜150 kDa (FIG. 4B, FIG. 4D). BoNTs are produced as a single polypeptide. The linker region between LC and H_{N} needs to be separated by proteases in order to release LC upon entry into the cytosol. This process is known as “activation.” Activated LC-H_{N} remains connected by a disulfide bond before reaching the cytosol. To facilitate the activation step, an extra thrombin cleavage site was introduced between LC and HN. Treatment of thrombin resulted in almost compete activation of these ligated toxins (FIG. 4C, FIG. 4E-F).

[0314] The ligated toxins were evaluated for their efficacy in inducing local muscle paralysis using a well-established mouse Digit Abduction Score assay ³⁰. In this assay, a tiny amount of ligated toxin was injected into the hind leg of mice. Paralysis of this leg leads to loss of ability to spread the toe during startle response. The degree of toe spread reflects the degree of muscle paralysis, and can be quantified on the scale of 0 (no paralysis) to 4 (severest paralysis) (FIG. 5A). Compared with the same dose of wild type (WT), the T1063P/H1064R combination clearly and consistently induced a lower degree of paralysis (FIG. 5B), indicating that this combination was detrimental to BoNT/A1. Similarly, F917R, F917K, N954Q, S957Q, and D1289Y all showed lower activity than WT toxin (FIG. 5C). Many other mutations such as NSIS954-957SKINTQEIK990-994NKQNI, and L1278F showed no significant impact on the degree of paralysis (FIG. 5B). Interestingly, N1025T/N1026K, R1156M, T1232R, R1294S/P1295S all showed higher degree of paralysis than WT (FIG. 5D), suggesting that these residue changes enhanced the overall efficacy of BoNT/A1 in inducing local muscle paralysis. DAS of T1063P and H1064 were measured along side wildtype H_{C}/A1-WT (FIG. 5E). T1063P showed higher scores than WT, while H1064Q showed reduced activity compared to WT.

[0315] The activity of detrimental and neutral mutations such as T1063P/H1064R, NSIS954-957SKIN and TQEIK990-994NKQNI was examined at a high dose (30 pg). At this high dose, toxins diffused to other regions and induced body weight reduction. If body weight reduction reached >20%, mice were euthanized due to safety protocols. Each mouse was weighed and their DAS scores were recorded to determine the degree of toxin diffusion. WT toxin at 30 pg resulted in score 4 and >20% body weight reduction. T1063P/H1064R, NSIS954-957SKIN, and TQEIK990-994NKQNI induced score 4 paralysis similar to WT toxin, (Table 5).

TABLE 5
Maximum DAS scores and weight loss for BoNT
injected mice with 30 pg dose (n > 2).
Mice with >20% body weight loss were
euthanized according to safety protocol.

| | Maximum | Loss of |
|---|---|---|
| Mutants | DAS score | weight, % |
| Hc/A1-WT | 4 | >20 |
| Hc/A1-CM | 3 | 7.3 |
| Hc/A1-NSIS954-957SKIN | 4 | 10.3 |
| Hc/A1-TQEIK990-994NKQNI | 4 | 19.4 |
| Hc/A1-N1025T/N1026K | 4 | >20 |
| Hc/A1-T1063P/H1064R | 4 | 2.5 |
| Hc/A1-R1156M | 4 | >20 |
| Hc/A1-T1232R | 4 | >20 |
| Hc/A1-L1278F | 4 | 17.9 |
| Hc/A1-R1294S/P1295S | 4 | >20 |

[0316] Interestingly, T1063P/H1064R, NSIS954-957SKIN, and L1278F showed less reduction in body weight (2.5% for T1063P/H1064R, 10.3% for NSIS954-957SKIN, and 17.9% for L1278F) than WT toxin, and no mice needed euthanization. Although these mutants showed reduced potency when compared to WT toxins, the data suggests that they have reduced systemic toxicity at a dosage that induces the same degree of paralysis as WT toxin. Thus, mutations at these sites also confer beneficial properties of reduced diffusion compared with WT H_{C}/A1.

### Rational Design of Consensus Mutagenesis of H_{C}/A1

[0317] Positions for consensus mutagenesis of H_{C}/A2 were also identified (Table 6 and Table 7).

TABLE 6
Consensus mutations for Hc/A2.

| Sequence in A2 | Majority in other subtypes |
|---|---|
| K915 | Q |
| T923 | K |
| S1090 | N |
| N1103 | D |
| F1117 | Y |
| E1156 | M |
| E1170 | K |
| D1227 | N |
| L1254 | Q |
| Y1255 | F |
| D1256 | N |

TABLE 7
Potential effects of each tested mutation for Hc/A1, which might
improve efficacy or reduce diffusion and systemic toxicity.

| | Potential effects | |
|---|---|---|
| Consensus mutations | Improving efficacy | Reducing diffusion |
| N954S/S955K/S957N | | ◯ |
| N1025T/N1026K | ◯ | |
| T1063P/H1064R | | ◯ |
| R1156M | ◯ | |
| T1232R | ◯ | |
| R1294S/P1295S | ◯ | |
| L1278F | | ◯ |

### Materials and Methods

[0318] Materials: All protein biomaterials were reconstituted in Tris-buffered saline (TBS: 50 mM Tris, 150 mM NaCl, pH7.5) unless indicated otherwise.

[0319] cDNA and constructs: DNA encoding BoNT/A1-LC-H_{N} and BoNT/A1-H_{C} (residue 1-875 and residue 882-1296, respectively based on GenBank access No:ACS52162.1) were synthesized by Genewiz Inc., and its codon was optimized for expression in E. coli. The construct of LC-H_{N} contained an artificial linker with a thrombin cleavage site (ASLVPRGSGGSAAA) (SEQ ID NO: 124) between residue 441 and 442. DNA encoding the recombinant proteins was subcloned into pET28a vectors to contain both a His6 tag and a thrombin cleavage site (LVPRGS) (SEQ ID NO: 125) fused to the N-terminus of BoNT/A1-H_{C}, and both a sortase tag (LPETG) (SEQ ID NO: 126) and a His6 tag fused to the C-terminus of BoNT/A1-LC-HN. Mutations in BoNT/A1-H_{C} were generated via PCR using a pair of primers containing each mutation. All constructs were verified by sequencing.

[0320] Protein expression and purification: WT and mutants of BoNT/A1-H_{C} were expressed as His6 tagged recombinant proteins in E. coli BL21(DE3) strain with the induction temperature at 18° C. overnight in the autoinduction medium (Formedium, Ltd.). His6-fusion proteins were purified using Ni-NTA bead charged column. Briefly, bacterial lysates were incubated with Ni-NTA beads, followed by flow-through of washing buffer (40 mM imidazole, TBS, pH7.5) and elution buffer (100-500 mM imidazole, TBS, pH7.5). Eluted proteins were desalted and digested with thrombin Sepharose bead (BioVision, Inc.). Inactivated proteins were removed using prewashed Ni-NTA beads, and supernatant (activated proteins) was concentrated, quantified and frozen (−80° C.) until use.

[0321] Sortase ligation: 4 μM of substrate proteins, LC-H_{N} and H_{C} were premixed with TBS, pH 7.5 containing 10 mM CaCl₂. 0.5 μM of recombinant sortase was added and incubated for 40 minutes at room temperature. Prewashed Ni-NTA beads were loaded to remove His-tagged sortase and unligated substrate proteins. Supernatant was only activated using 25 U/ml thrombin (Millipore) for 40 minutes at room temperature. Some of ligated products were analyzed on the SDS-PAGE gel with or without 2-mercaptoethanol to confirm ligation and activation. Full-length toxins were quantified based on protein density on the gel using BSA as a standard (0.15-0.9 μg).

[0322] Digital Abduction Score (DAS) assay: The control BoNT/A1 WT and mutant toxins (ligated and thrombin-activated full-length toxins) were reconstituted in phosphate buffer containing 0.2% gelatin (pH 6.3), and serial dilutions were prepared based on preliminary dose-response analysis. The following final concentrations were tested in DAS assay: 5, 15 and 30 pg/mouse (CD-1 strain, Envigo). The 10 μl diluted toxins were injected into the right gastrocnemius muscle of each mouse. Their scores were monitored according to FIG. 5A.

TABLE 8
Amino acid sequences

| SEQ | | |
|---|---|---|
| ID | | |
| NO: | Description | Sequence |
| 1 | BoNT/ | MPFVNKQFNYKDPVNGVDIAYIKIPNAGQM |
| | A1 | QPVKAFKIHNKIWVIPERDTFTNPEEGDLN |
| | WT Full | PPPEAKQVPVSYYDSTYLSTDNEKDNYLKG |
| | length | VTKLFERIYSTDLGRMLLTSIVRGIPFWGG |
| | | STIDTELKVIDTNCINVIQPDGSYRSEELN |
| | | LVIIGPSADIIQFECKSFGHEVLNLTRNGY |
| | | GSTQYIRFSPDFTFGFEESLEVDTNPLLGA |
| | | GKFATDPAVTLAHELIHAGHRLYGIAINPN |
| | | RVFKVNTNAYYEMSGLEVSFEELRTFGGHD |
| | | AKFIDSLQENEFRLYYYNKFKDIASTLNKA |
| | | KSIVGTTASLQYMKNVFKEKYLLSEDTSGK |
| | | FSVDKLKFDKLYKMLTEIYTEDNFVKFFKV |
| | | LNRKTYLNFDKAVFKINIVPKVNYTIYDGF |
| | | NLRNTNLAANFNGQNTEINNMNFTKLKNFT |
| | | GLFEFYKLLCVRGIITSKTKSLDKGYNKAL |
| | | NDLCIKVNNWDLFFSPSEDNFTNDLNKGEE |
| | | ITSDTNIEAAEENISLDLIQQYYLTFNFDN |
| | | EPENISIENLSSDIIGQLELMPNIERFPNG |
| | | KKYELDKYTMFHYLRAQEFEHGKSRIALTN |
| | | SVNEALLNPSRVYTFFSSDYVKKVNKATEA |
| | | AMFLGWVEQLVYDFTDETSEVSTTDKIADI |
| | | TIIIPYIGPALNIGNMLYKDDFVGALIFSG |
| | | AVILLEFIPEIAIPVLGTFALVSYIANKVL |
| | | TVQTIDNALSKRNEKWDEVYKYIVTNWLAK |
| | | VNTQIDLIRKKMKEALENQAEATKAIINYQ |
| | | YNQYTEEEKNNINFNIDDLSSKLNESINKA |
| | | MININKFLNQCSVSYLMNSMIPYGVKRLED |
| | | FDASLKDALLKYIYDNRGTLIGQVDRLKDK |
| | | VNNTLSTDIPFQLSKYVDNQRLLSTFTEYI |
| | | KNIINTSILNLRYESNHLIDLSRYASKINI |
| | | GSKVNFDPIDKNQIQLFNLESSKIEVILKN |
| | | AIVYNSMYENFSTSFWIRIPKYFNSISLNN |
| | | EYTIINCMENNSGWKVSLNYGEIIWTLQDT |
| | | QEIKQRVVFKYSQMINISDYINRWIFVTIT |
| | | NNRLNNSKIYINGRLIDQKPISNLGNIHAS |
| | | NNIMFKLDGCRDTHRYIWIKYFNLFDKELN |
| | | EKEIKDLYDNQSNSGILKDFWGDYLQYDKP |
| | | YYMLNLYDPNKYVDVNNVGIRGYMYLKGPR |
| | | GSVMTTNIYLNSSLYRGTKFIIKKYASGNK |
| | | DNIVRNNDRVYINVVVKNKEYRLATNASQA |
| | | GVEKILSALEIPDVGNLSQVVVMKSKNDQG |
| | | ITNKCKMNLQDNNGNDIGFIGFHQFNNIAK |
| | | LVASNWYNRQIERSSRTLGCSWEFIPVDDG |
| | | WGERPL |
| 2 | BoNT/ | MPFVNKQFNYKDPVNGVDIAYIKIPNAGQM |
| | A2 | QPVKAFKIHNKIWVIPERDTFTNPEEGDLN |
| | WT Full | PPPEAKQVPVSYYDSTYLSTDNEKDNYLKG |
| | length | VTKLFERIYSTDLGRMLLTSIVRGIPFWGG |
| | | STIDTELKVIDTNCINVIQPDGSYRSEELN |
| | | LVIIGPSADIIQFECKSFGHDVLNLTRNGY |
| | | GSTQYIRFSPDFTFGFEESLEVDTNPLLGA |
| | | GKFATDPAVTLAHELIHAEHRLYGIAINPN |
| | | RVFKVNTNAYYEMSGLEVSFEELRTFGGHD |
| | | AKFIDSLQENEFRLYYYNKFKDVASTLNKA |
| | | KSIIGTTASLQYMKNVFKEKYLLSEDTSGK |
| | | FSVDKLKFDKLYKMLTEIYTEDNFVNFFKV |
| | | INRKTYLNFDKAVFRINIVPDENYTIKDGF |
| | | NLKGANLSTNFNGQNTEINSRNFTRLKNFT |
| | | GLFEFYKLLCVRGIIPFKTKSLDEGYNKAL |
| | | NDLCIKVNNWDLFFSPSEDNFTNDLDKVEE |
| | | ITADTNIEAAEENISLDLIQQYYLTFDFDN |
| | | EPENISIENLSSDIIGQLEPMPNIERFPNG |
| | | KKYELDKYTMFHYLRAQEFEHGDSRIILTN |
| | | SAEEALLKPNVAYTFFSSKYVKKINKAVEA |
| | | FMFLNWAEELVYDFTDETNEVTTMDKIADI |
| | | TIIVPYIGPALNIGNMLSKGEFVEAIIFTG |
| | | VVAMLEFIPEYALPVFGTFAIVSYIANKVL |
| | | TVQTINNALSKRNEKWDEVYKYTVTNWLAK |
| | | VNTQIDLIREKMKKALENQAEATKAIINYQ |
| | | YNQYTEEEKNNINFNIDDLSSKLNESINSA |
| | | MININKFLDQCSVSYLMNSMIPYAVKRLKD |
| | | FDASVRDVLLKYIYDNRGTLVLQVDRLKDE |
| | | VNNTLSADIPFQLSKYVDNKKLLSTFTEYI |
| | | KNIVNTSILSIVYKKDDLIDLSRYGAKINI |
| | | GDRVYYDSIDKNQIKLINLESSTIEVILKN |
| | | AIVYNSMYENFSTSFWIKIPKYFSKINLNN |
| | | EYTIINCIENNSGWKVSLNYGEIIWTLQDN |
| | | KQNIQRVVFKYSQMVNISDYINRWIFVTIT |
| | | NNRLTKSKIYINGRLIDQKPISNLGNIHAS |
| | | NKIMFKLDGCRDPRRYIMIKYFNLFDKELN |
| | | EKEIKDLYDSQSNSGILKDFWGNYLQYDKP |
| | | YYMLNLFDPNKYVDVNNIGIRGYMYLKGPR |
| | | GSVVTTNIYLNSTLYEGTKFIIKKYASGNE |
| | | DNIVRNNDRVYINVVVKNKEYRLATNASQA |
| | | GVEKILSALEIPDVGNLSQVVVMKSKDDQG |
| | | IRNKCKMNLQDNNGNDIGFIGFHLYDNIAK |
| | | LVASNWYNRQVGKASRTFGCSWEFIPVDDG |
| | | WGESSL |
| 3 | BoNT/ | MPFVNKQFNYKDPVNGVDIAYIKIPNAGQM |
| | A1-F917R | QPVKAFKIHNKIWVIPERDTFTNPEEGDLN |
| | | PPPEAKQVPVSYYDSTYLSTDNEKDNYLKG |
| | | VTKLFERIYSTDLGRMLLTSIVRGIPFWGG |
| | | STIDTELKVIDTNCINVIQPDGSYRSEELN |
| | | LVIIGPSADIIQFECKSFGHEVLNLTRNGY |
| | | GSTQYIRFSPDFTFGFEESLEVDTNPLLGA |
| | | GKFATDPAVTLAHELIHAGHRLYGIAINPN |
| | | RVFKVNTNAYYEMSGLEVSFEELRTFGGHD |
| | | AKFIDSLQENEFRLYYYNKFKDIASTLNKA |
| | | KSIVGTTASLQYMKNVFKEKYLLSEDTSGK |
| | | FSVDKLKFDKLYKMLTEIYTEDNFVKFFKV |
| | | LNRKTYLNFDKAVFKINIVPKVNYTIYDGF |
| | | NLRNTNLAANFNGQNTEINNMNFTKLKNFT |
| | | GLFEFYKLLCVRGIITSKTKSLDKGYNKAL |
| | | NDLCIKVNNWDLFFSPSEDNFTNDLNKGEE |
| | | ITSDTNIEAAEENISLDLIQQYYLTFNFDN |
| | | EPENISIENLSSDIIGQLELMPNIERFPNG |
| | | KKYELDKYTMFHYLRAQEFEHGKSRIALTN |
| | | SVNEALLNPSRVYTFFSSDYVKKVNKATEA |
| | | AMFLGWVEQLVYDFTDETSEVSTTDKIADI |
| | | TIIIPYIGPALNIGNMLYKDDFVGALIFSG |
| | | AVILLEFIPEIAIPVLGTFALVSYIANKVL |
| | | TVQTIDNALSKRNEKWDEVYKYIVTNWLAK |
| | | VNTQIDLIRKKMKEALENQAEATKAIINYQ |
| | | YNQYTEEEKNNINFNIDDLSSKLNESINKA |
| | | MININKFLNQCSVSYLMNSMIPYGVKRLED |
| | | FDASLKDALLKYIYDNRGTLIGQVDRLKDK |
| | | VNNTLSTDIPFQLSKYVDNQRLLSTFTEYI |
| | | KNIINTSILNLRYESNHLIDLSRYASKINI |
| | | GSKVNFDPIDKNQIQLRNLESSKIEVILKN |
| | | AIVYNSMYENFSTSFWIRIPKYFNSISLNN |
| | | EYTIINCMENNSGWKVSLNYGEIIWTLQDT |
| | | QEIKQRVVFKYSQMINISDYINRWIFVTIT |
| | | NNRLNNSKIYINGRLIDQKPISNLGNIHAS |
| | | NNIMFKLDGCRDTHRYIWIKYFNLFDKELN |
| | | EKEIKDLYDNQSNSGILKDFWGDYLQYDKP |
| | | YYMLNLYDPNKYVDVNNVGIRGYMYLKGPR |
| | | GSVMTTNIYLNSSLYRGTKFIIKKYASGNK |
| | | DNIVRNNDRVYINVVVKNKEYRLATNASQA |
| | | GVEKILSALEIPDVGNLSQVVVMKSKNDQG |
| | | ITNKCKMNLQDNNGNDIGFIGFHQFNNIAK |
| | | LVASNWYNRQIERSSRTLGCSWEFIPVDDG |
| | | WGERPL |
| 4 | BoNT/ | MPFVNKQFNYKDPVNGVDIAYIKIPNAGQM |
| | A1-F917K | QPVKAFKIHNKIWVIPERDTFTNPEEGDLN |
| | | PPPEAKQVPVSYYDSTYLSTDNEKDNYLKG |
| | | VTKLFERIYSTDLGRMLLTSIVRGIPFWGG |
| | | STIDTELKVIDTNCINVIQPDGSYRSEELN |
| | | LVIIGPSADIIQFECKSFGHEVLNLTRNGY |
| | | GSTQYIRFSPDFTFGFEESLEVDTNPLLGA |
| | | GKFATDPAVTLAHELIHAGHRLYGIAINPN |
| | | RVFKVNTNAYYEMSGLEVSFEELRTFGGHD |
| | | AKFIDSLQENEFRLYYYNKFKDIASTLNKA |
| | | KSIVGTTASLQYMKNVFKEKYLLSEDTSGK |
| | | FSVDKLKFDKLYKMLTEIYTEDNFVKFFKV |
| | | LNRKTYLNFDKAVFKINIVPKVNYTIYDGF |
| | | NLRNTNLAANFNGQNTEINNMNFTKLKNFT |
| | | GLFEFYKLLCVRGIITSKTKSLDKGYNKAL |
| | | NDLCIKVNNWDLFFSPSEDNFTNDLNKGEE |
| | | ITSDTNIEAAEENISLDLIQQYYLTFNFDN |
| | | EPENISIENLSSDIIGQLELMPNIERFPNG |
| | | KKYELDKYTMFHYLRAQEFEHGKSRIALTN |
| | | SVNEALLNPSRVYTFFSSDYVKKVNKATEA |
| | | AMFLGWVEQLVYDFTDETSEVSTTDKIADI |
| | | TIIIPYIGPALNIGNMLYKDDFVGALIFSG |
| | | AVILLEFIPEIAIPVLGTFALVSYIANKVL |
| | | TVQTIDNALSKRNEKWDEVYKYIVTNWLAK |
| | | VNTQIDLIRKKMKEALENQAEATKAIINYQ |
| | | YNQYTEEEKNNINFNIDDLSSKLNESINKA |
| | | MININKFLNQCSVSYLMNSMIPYGVKRLED |
| | | FDASLKDALLKYIYDNRGTLIGQVDRLKDK |
| | | VNNTLSTDIPFQLSKYVDNQRLLSTFTEYI |
| | | KNIINTSILNLRYESNHLIDLSRYASKINI |
| | | GSKVNFDPIDKNQIQLKNLESSKIEVILKN |
| | | AIVYNSMYENFSTSFWIRIPKYFNSISLNN |
| | | EYTIINCMENNSGWKVSLNYGEIIWTLQDT |
| | | QEIKQRVVFKYSQMINISDYINRWIFVTIT |
| | | NNRLNNSKIYINGRLIDQKPISNLGNIHAS |
| | | NNIMFKLDGCRDTHRYIWIKYFNLFDKELN |
| | | EKEIKDLYDNQSNSGILKDFWGDYLQYDKP |
| | | YYMLNLYDPNKYVDVNNVGIRGYMYLKGPR |
| | | GSVMTTNIYLNSSLYRGTKFIIKKYASGNK |
| | | DNIVRNNDRVYINVVVKNKEYRLATNASQA |
| | | GVEKILSALEIPDVGNLSQVVVMKSKNDQG |
| | | ITNKCKMNLQDNNGNDIGFIGFHQFNNIAK |
| | | LVASNWYNRQIERSSRTLGCSWEFIPVDDG |
| | | WGERPL |
| 5 | BoNT/ | MPFVNKQFNYKDPVNGVDIAYIKIPNAGQM |
| | A1-F953H | QPVKAFKIHNKIWVIPERDTFTNPEEGDLN |
| | | PPPEAKQVPVSYYDSTYLSTDNEKDNYLKG |
| | | VTKLFERIYSTDLGRMLLTSIVRGIPFWGG |
| | | STIDTELKVIDTNCINVIQPDGSYRSEELN |
| | | LVIIGPSADIIQFECKSFGHEVLNLTRNGY |
| | | GSTQYIRFSPDFTFGFEESLEVDTNPLLGA |
| | | GKFATDPAVTLAHELIHAGHRLYGIAINPN |
| | | RVFKVNTNAYYEMSGLEVSFEELRTFGGHD |
| | | AKFIDSLQENEFRLYYYNKFKDIASTLNKA |
| | | KSIVGTTASLQYMKNVFKEKYLLSEDTSGK |
| | | FSVDKLKFDKLYKMLTEIYTEDNFVKFFKV |
| | | LNRKTYLNFDKAVFKINIVPKVNYTIYDGF |
| | | NLRNTNLAANFNGQNTEINNMNFTKLKNFT |
| | | GLFEFYKLLCVRGIITSKTKSLDKGYNKAL |
| | | NDLCIKVNNWDLFFSPSEDNFTNDLNKGEE |
| | | ITSDTNIEAAEENISLDLIQQYYLTFNFDN |
| | | EPENISIENLSSDIIGQLELMPNIERFPNG |
| | | KKYELDKYTMFHYLRAQEFEHGKSRIALTN |
| | | SVNEALLNPSRVYTFFSSDYVKKVNKATEA |
| | | AMFLGWVEQLVYDFTDETSEVSTTDKIADI |
| | | TIIIPYIGPALNIGNMLYKDDFVGALIFSG |
| | | AVILLEFIPEIAIPVLGTFALVSYIANKVL |
| | | TVQTIDNALSKRNEKWDEVYKYIVTNWLAK |
| | | VNTQIDLIRKKMKEALENQAEATKAIINYQ |
| | | YNQYTEEEKNNINFNIDDLSSKLNESINKA |
| | | MININKFLNQCSVSYLMNSMIPYGVKRLED |
| | | FDASLKDALLKYIYDNRGTLIGQVDRLKDK |
| | | VNNTLSTDIPFQLSKYVDNQRLLSTFTEYI |
| | | KNIINTSILNLRYESNHLIDLSRYASKINI |
| | | GSKVNFDPIDKNQIQLFNLESSKIEVILKN |
| | | AIVYNSMYENFSTSFWIRIPKYHNSISLNN |
| | | EYTIINCMENNSGWKVSLNYGEIIWTLQDT |
| | | QEIKQRVVFKYSQMINISDYINRWIFVTIT |
| | | NNRLNNSKIYINGRLIDQKPISNLGNIHAS |
| | | NNIMFKLDGCRDTHRYIWIKYFNLFDKELN |
| | | EKEIKDLYDNQSNSGILKDFWGDYLQYDKP |
| | | YYMLNLYDPNKYVDVNNVGIRGYMYLKGPR |
| | | GSVMTTNIYLNSSLYRGTKFIIKKYASGNK |
| | | DNIVRNNDRVYINVVVKNKEYRLATNASQA |
| | | GVEKILSALEIPDVGNLSQVVVMKSKNDQG |
| | | ITNKCKMNLQDNNGNDIGFIGFHQFNNIAK |
| | | LVASNWYNRQIERSSRTLGCSWEFIPVDDG |
| | | WGERPL |
| 6 | BoNT/ | MPFVNKQFNYKDPVNGVDIAYIKIPNAGQM |
| | A1-F953Y | QPVKAFKIHNKIWVIPERDTFTNPEEGDLN |
| | | PPPEAKQVPVSYYDSTYLSTDNEKDNYLKG |
| | | VTKLFERIYSTDLGRMLLTSIVRGIPFWGG |
| | | STIDTELKVIDTNCINVIQPDGSYRSEELN |
| | | LVIIGPSADIIQFECKSFGHEVLNLTRNGY |
| | | GSTQYIRFSPDFTFGFEESLEVDTNPLLGA |
| | | GKFATDPAVTLAHELIHAGHRLYGIAINPN |
| | | RVFKVNTNAYYEMSGLEVSFEELRTFGGHD |
| | | AKFIDSLQENEFRLYYYNKFKDIASTLNKA |
| | | KSIVGTTASLQYMKNVFKEKYLLSEDTSGK |
| | | FSVDKLKFDKLYKMLTEIYTEDNFVKFFKV |
| | | LNRKTYLNFDKAVFKINIVPKVNYTIYDGF |
| | | NLRNTNLAANFNGQNTEINNMNFTKLKNFT |
| | | GLFEFYKLLCVRGIITSKTKSLDKGYNKAL |
| | | NDLCIKVNNWDLFFSPSEDNFTNDLNKGEE |
| | | ITSDTNIEAAEENISLDLIQQYYLTFNFDN |
| | | EPENISIENLSSDIIGQLELMPNIERFPNG |
| | | KKYELDKYTMFHYLRAQEFEHGKSRIALTN |
| | | SVNEALLNPSRVYTFFSSDYVKKVNKATEA |
| | | AMFLGWVEQLVYDFTDETSEVSTTDKIADI |
| | | TIIIPYIGPALNIGNMLYKDDFVGALIFSG |
| | | AVILLEFIPEIAIPVLGTFALVSYIANKVL |
| | | TVQTIDNALSKRNEKWDEVYKYIVTNWLAK |
| | | VNTQIDLIRKKMKEALENQAEATKAIINYQ |
| | | YNQYTEEEKNNINFNIDDLSSKLNESINKA |
| | | MININKFLNQCSVSYLMNSMIPYGVKRLED |
| | | FDASLKDALLKYIYDNRGTLIGQVDRLKDK |
| | | VNNTLSTDIPFQLSKYVDNQRLLSTFTEYI |
| | | KNIINTSILNLRYESNHLIDLSRYASKINI |
| | | GSKVNFDPIDKNQIQLFNLESSKIEVILKN |
| | | AIVYNSMYENFSTSFWIRIPKYYNSISLNN |
| | | EYTIINCMENNSGWKVSLNYGEIIWTLQDT |
| | | QEIKQRVVFKYSQMINISDYINRWIFVTIT |
| | | NNRLNNSKIYINGRLIDQKPISNLGNIHAS |
| | | NNIMFKLDGCRDTHRYIWIKYFNLFDKELN |
| | | EKEIKDLYDNQSNSGILKDFWGDYLQYDKP |
| | | YYMLNLYDPNKYVDVNNVGIRGYMYLKGPR |
| | | GSVMTTNIYLNSSLYRGTKFIIKKYASGNK |
| | | DNIVRNNDRVYINVVVKNKEYRLATNASQA |
| | | GVEKILSALEIPDVGNLSQVVVMKSKNDQG |
| | | ITNKCKMNLQDNNGNDIGFIGFHQFNNIAK |
| | | LVASNWYNRQIERSSRTLGCSWEFIPVDDG |
| | | WGERPL |
| 7 | BoNT/ | MPFVNKQFNYKDPVNGVDIAYIKIPNAGQM |
| | A1-N954S | QPVKAFKIHNKIWVIPERDTFTNPEEGDLN |
| | | PPPEAKQVPVSYYDSTYLSTDNEKDNYLKG |
| | | VTKLFERIYSTDLGRMLLTSIVRGIPFWGG |
| | | STIDTELKVIDTNCINVIQPDGSYRSEELN |
| | | LVIIGPSADIIQFECKSFGHEVLNLTRNGY |
| | | GSTQYIRFSPDFTFGFEESLEVDTNPLLGA |
| | | GKFATDPAVTLAHELIHAGHRLYGIAINPN |
| | | RVFKVNTNAYYEMSGLEVSFEELRTFGGHD |
| | | AKFIDSLQENEFRLYYYNKFKDIASTLNKA |
| | | KSIVGTTASLQYMKNVFKEKYLLSEDTSGK |
| | | FSVDKLKFDKLYKMLTEIYTEDNFVKFFKV |
| | | LNRKTYLNFDKAVFKINIVPKVNYTIYDGF |
| | | NLRNTNLAANFNGQNTEINNMNFTKLKNFT |
| | | GLFEFYKLLCVRGIITSKTKSLDKGYNKAL |
| | | NDLCIKVNNWDLFFSPSEDNFTNDLNKGEE |
| | | ITSDTNIEAAEENISLDLIQQYYLTFNFDN |
| | | EPENISIENLSSDIIGQLELMPNIERFPNG |
| | | KKYELDKYTMFHYLRAQEFEHGKSRIALTN |
| | | SVNEALLNPSRVYTFFSSDYVKKVNKATEA |
| | | AMFLGWVEQLVYDFTDETSEVSTTDKIADI |
| | | TIIIPYIGPALNIGNMLYKDDFVGALIFSG |
| | | AVILLEFIPEIAIPVLGTFALVSYIANKVL |
| | | TVQTIDNALSKRNEKWDEVYKYIVTNWLAK |
| | | VNTQIDLIRKKMKEALENQAEATKAIINYQ |
| | | YNQYTEEEKNNINFNIDDLSSKLNESINKA |
| | | MININKFLNQCSVSYLMNSMIPYGVKRLED |
| | | FDASLKDALLKYIYDNRGTLIGQVDRLKDK |
| | | VNNTLSTDIPFQLSKYVDNQRLLSTFTEYI |
| | | KNIINTSILNLRYESNHLIDLSRYASKINI |
| | | GSKVNFDPIDKNQIQLFNLESSKIEVILKN |
| | | AIVYNSMYENFSTSFWIRIPKYFSSISLNN |
| | | EYTIINCMENNSGWKVSLNYGEIIWTLQDT |
| | | QEIKQRVVFKYSQMINISDYINRWIFVTIT |
| | | NNRLNNSKIYINGRLIDQKPISNLGNIHAS |
| | | NNIMFKLDGCRDTHRYIWIKYFNLFDKELN |
| | | EKEIKDLYDNQSNSGILKDFWGDYLQYDKP |
| | | YYMLNLYDPNKYVDVNNVGIRGYMYLKGPR |
| | | GSVMTTNIYLNSSLYRGTKFIIKKYASGNK |
| | | DNIVRNNDRVYINVVVKNKEYRLATNASQA |
| | | GVEKILSALEIPDVGNLSQVVVMKSKNDQG |
| | | ITNKCKMNLQDNNGNDIGFIGFHQFNNIAK |
| | | LVASNWYNRQIERSSRTLGCSWEFIPVDDG |
| | | WGERPL |
| 8 | BoNT/ | MPFVNKQFNYKDPVNGVDIAYIKIPNAGQM |
| | A1-S955K | QPVKAFKIHNKIWVIPERDTFTNPEEGDLN |
| | | PPPEAKQVPVSYYDSTYLSTDNEKDNYLKG |
| | | VTKLFERIYSTDLGRMLLTSIVRGIPFWGG |
| | | STIDTELKVIDTNCINVIQPDGSYRSEELN |
| | | LVIIGPSADIIQFECKSFGHEVLNLTRNGY |
| | | GSTQYIRFSPDFTFGFEESLEVDTNPLLGA |
| | | GKFATDPAVTLAHELIHAGHRLYGIAINPN |
| | | RVFKVNTNAYYEMSGLEVSFEELRTFGGHD |
| | | AKFIDSLQENEFRLYYYNKFKDIASTLNKA |
| | | KSIVGTTASLQYMKNVFKEKYLLSEDTSGK |
| | | FSVDKLKFDKLYKMLTEIYTEDNFVKFFKV |
| | | LNRKTYLNFDKAVFKINIVPKVNYTIYDGF |
| | | NLRNTNLAANFNGQNTEINNMNFTKLKNFT |
| | | GLFEFYKLLCVRGIITSKTKSLDKGYNKAL |
| | | NDLCIKVNNWDLFFSPSEDNFTNDLNKGEE |
| | | ITSDTNIEAAEENISLDLIQQYYLTFNFDN |
| | | EPENISIENLSSDIIGQLELMPNIERFPNG |
| | | KKYELDKYTMFHYLRAQEFEHGKSRIALTN |
| | | SVNEALLNPSRVYTFFSSDYVKKVNKATEA |
| | | AMFLGWVEQLVYDFTDETSEVSTTDKIADI |
| | | TIIIPYIGPALNIGNMLYKDDFVGALIFSG |
| | | AVILLEFIPEIAIPVLGTFALVSYIANKVL |
| | | TVQTIDNALSKRNEKWDEVYKYIVTNWLAK |
| | | VNTQIDLIRKKMKEALENQAEATKAIINYQ |
| | | YNQYTEEEKNNINFNIDDLSSKLNESINKA |
| | | MININKFLNQCSVSYLMNSMIPYGVKRLED |
| | | FDASLKDALLKYIYDNRGTLIGQVDRLKDK |
| | | VNNTLSTDIPFQLSKYVDNQRLLSTFTEYI |
| | | KNIINTSILNLRYESNHLIDLSRYASKINI |
| | | GSKVNFDPIDKNQIQLFNLESSKIEVILKN |
| | | AIVYNSMYENFSTSFWIRIPKYFNKISLNN |
| | | EYTIINCMENNSGWKVSLNYGEIIWTLQDT |
| | | QEIKQRVVFKYSQMINISDYINRWIFVTIT |
| | | NNRLNNSKIYINGRLIDQKPISNLGNIHAS |
| | | NNIMFKLDGCRDTHRYIWIKYFNLFDKELN |
| | | EKEIKDLYDNQSNSGILKDFWGDYLQYDKP |
| | | YYMLNLYDPNKYVDVNNVGIRGYMYLKGPR |
| | | GSVMTTNIYLNSSLYRGTKFIIKKYASGNK |
| | | DNIVRNNDRVYINVVVKNKEYRLATNASQA |
| | | GVEKILSALEIPDVGNLSQVVVMKSKNDQG |
| | | ITNKCKMNLQDNNGNDIGFIGFHQFNNIAK |
| | | LVASNWYNRQIERSSRTLGCSWEFIPVDDG |
| | | WGERPL |
| 9 | BoNT/ | MPFVNKQFNYKDPVNGVDIAYIKIPNAGQM |
| | A1-S957N | QPVKAFKIHNKIWVIPERDTFTNPEEGDLN |
| | | PPPEAKQVPVSYYDSTYLSTDNEKDNYLKG |
| | | VTKLFERIYSTDLGRMLLTSIVRGIPFWGG |
| | | STIDTELKVIDTNCINVIQPDGSYRSEELN |
| | | LVIIGPSADIIQFECKSFGHEVLNLTRNGY |
| | | GSTQYIRFSPDFTFGFEESLEVDTNPLLGA |
| | | GKFATDPAVTLAHELIHAGHRLYGIAINPN |
| | | RVFKVNTNAYYEMSGLEVSFEELRTFGGHD |
| | | AKFIDSLQENEFRLYYYNKFKDIASTLNKA |
| | | KSIVGTTASLQYMKNVFKEKYLLSEDTSGK |
| | | FSVDKLKFDKLYKMLTEIYTEDNFVKFFKV |
| | | LNRKTYLNFDKAVFKINIVPKVNYTIYDGF |
| | | NLRNTNLAANFNGQNTEINNMNFTKLKNFT |
| | | GLFEFYKLLCVRGIITSKTKSLDKGYNKAL |
| | | NDLCIKVNNWDLFFSPSEDNFTNDLNKGEE |
| | | ITSDTNIEAAEENISLDLIQQYYLTFNFDN |
| | | EPENISIENLSSDIIGQLELMPNIERFPNG |
| | | KKYELDKYTMFHYLRAQEFEHGKSRIALTN |
| | | SVNEALLNPSRVYTFFSSDYVKKVNKATEA |
| | | AMFLGWVEQLVYDFTDETSEVSTTDKIADI |
| | | TIIIPYIGPALNIGNMLYKDDFVGALIFSG |
| | | AVILLEFIPEIAIPVLGTFALVSYIANKVL |
| | | TVQTIDNALSKRNEKWDEVYKYIVTNWLAK |
| | | VNTQIDLIRKKMKEALENQAEATKAIINYQ |
| | | YNQYTEEEKNNINFNIDDLSSKLNESINKA |
| | | MININKFLNQCSVSYLMNSMIPYGVKRLED |
| | | FDASLKDALLKYIYDNRGTLIGQVDRLKDK |
| | | VNNTLSTDIPFQLSKYVDNQRLLSTFTEYI |
| | | KNIINTSILNLRYESNHLIDLSRYASKINI |
| | | GSKVNFDPIDKNQIQLFNLESSKIEVILKN |
| | | AIVYNSMYENFSTSFWIRIPKYFNSINLNN |
| | | EYTIINCMENNSGWKVSLNYGEIIWTLQDT |
| | | QEIKQRVVFKYSQMINISDYINRWIFVTIT |
| | | NNRLNNSKIYINGRLIDQKPISNLGNIHAS |
| | | NNIMFKLDGCRDTHRYIWIKYFNLFDKELN |
| | | EKEIKDLYDNQSNSGILKDFWGDYLQYDKP |
| | | YYMLNLYDPNKYVDVNNVGIRGYMYLKGPR |
| | | GSVMTTNIYLNSSLYRGTKFIIKKYASGNK |
| | | DNIVRNNDRVYINVVVKNKEYRLATNASQA |
| | | GVEKILSALEIPDVGNLSQVVVMKSKNDQG |
| | | ITNKCKMNLQDNNGNDIGFIGFHQFNNIAK |
| | | LVASNWYNRQIERSSRTLGCSWEFIPVDDG |
| | | WGERPL |
| 10 | BoNT/ | MPFVNKQFNYKDPVNGVDIAYIKIPNAGQM |
| | A1-M9681 | QPVKAFKIHNKIWVIPERDTFTNPEEGDLN |
| | | PPPEAKQVPVSYYDSTYLSTDNEKDNYLKG |
| | | VTKLFERIYSTDLGRMLLTSIVRGIPFWGG |
| | | STIDTELKVIDTNCINVIQPDGSYRSEELN |
| | | LVIIGPSADIIQFECKSFGHEVLNLTRNGY |
| | | GSTQYIRFSPDFTFGFEESLEVDTNPLLGA |
| | | GKFATDPAVTLAHELIHAGHRLYGIAINPN |
| | | RVFKVNTNAYYEMSGLEVSFEELRTFGGHD |
| | | AKFIDSLQENEFRLYYYNKFKDIASTLNKA |
| | | KSIVGTTASLQYMKNVFKEKYLLSEDTSGK |
| | | FSVDKLKFDKLYKMLTEIYTEDNFVKFFKV |
| | | LNRKTYLNFDKAVFKINIVPKVNYTIYDGF |
| | | NLRNTNLAANFNGQNTEINNMNFTKLKNFT |
| | | GLFEFYKLLCVRGIITSKTKSLDKGYNKAL |
| | | NDLCIKVNNWDLFFSPSEDNFTNDLNKGEE |
| | | ITSDTNIEAAEENISLDLIQQYYLTFNFDN |
| | | EPENISIENLSSDIIGQLELMPNIERFPNG |
| | | KKYELDKYTMFHYLRAQEFEHGKSRIALTN |
| | | SVNEALLNPSRVYTFFSSDYVKKVNKATEA |
| | | AMFLGWVEQLVYDFTDETSEVSTTDKIADI |
| | | TIIIPYIGPALNIGNMLYKDDFVGALIFSG |
| | | AVILLEFIPEIAIPVLGTFALVSYIANKVL |
| | | TVQTIDNALSKRNEKWDEVYKYIVTNWLAK |
| | | VNTQIDLIRKKMKEALENQAEATKAIINYQ |
| | | YNQYTEEEKNNINFNIDDLSSKLNESINKA |
| | | MININKFLNQCSVSYLMNSMIPYGVKRLED |
| | | FDASLKDALLKYIYDNRGTLIGQVDRLKDK |
| | | VNNTLSTDIPFQLSKYVDNQRLLSTFTEYI |
| | | KNIINTSILNLRYESNHLIDLSRYASKINI |
| | | GSKVNFDPIDKNQIQLFNLESSKIEVILKN |
| | | AIVYNSMYENFSTSFWIRIPKYFNSISLNN |
| | | EYTIINCIENNSGWKVSLNYGEIIWTLQDT |
| | | QEIKQRVVFKYSQMINISDYINRWIFVTIT |
| | | NNRLNNSKIYINGRLIDQKPISNLGNIHAS |
| | | NNIMFKLDGCRDTHRYIWIKYFNLFDKELN |
| | | EKEIKDLYDNQSNSGILKDFWGDYLQYDKP |
| | | YYMLNLYDPNKYVDVNNVGIRGYMYLKGPR |
| | | GSVMTTNIYLNSSLYRGTKFIIKKYASGNK |
| | | DNIVRNNDRVYINVVVKNKEYRLATNASQA |
| | | GVEKILSALEIPDVGNLSQVVVMKSKNDQG |
| | | ITNKCKMNLQDNNGNDIGFIGFHQFNNIAK |
| | | LVASNWYNRQIERSSRTLGCSWEFIPVDDG |
| | | WGERPL |
| 11 | BoNT/ | MPFVNKQFNYKDPVNGVDIAYIKIPNAGQM |
| | A1-N1025T | QPVKAFKIHNKIWVIPERDTFTNPEEGDLN |
| | | PPPEAKQVPVSYYDSTYLSTDNEKDNYLKG |
| | | VTKLFERIYSTDLGRMLLTSIVRGIPFWGG |
| | | STIDTELKVIDTNCINVIQPDGSYRSEELN |
| | | LVIIGPSADIIQFECKSFGHEVLNLTRNGY |
| | | GSTQYIRFSPDFTFGFEESLEVDTNPLLGA |
| | | GKFATDPAVTLAHELIHAGHRLYGIAINPN |
| | | RVFKVNTNAYYEMSGLEVSFEELRTFGGHD |
| | | AKFIDSLQENEFRLYYYNKFKDIASTLNKA |
| | | KSIVGTTASLQYMKNVFKEKYLLSEDTSGK |
| | | FSVDKLKFDKLYKMLTEIYTEDNFVKFFKV |
| | | LNRKTYLNFDKAVFKINIVPKVNYTIYDGF |
| | | NLRNTNLAANFNGQNTEINNMNFTKLKNFT |
| | | GLFEFYKLLCVRGIITSKTKSLDKGYNKAL |
| | | NDLCIKVNNWDLFFSPSEDNFTNDLNKGEE |
| | | ITSDTNIEAAEENISLDLIQQYYLTFNFDN |
| | | EPENISIENLSSDIIGQLELMPNIERFPNG |
| | | KKYELDKYTMFHYLRAQEFEHGKSRIALTN |
| | | SVNEALLNPSRVYTFFSSDYVKKVNKATEA |
| | | AMFLGWVEQLVYDFTDETSEVSTTDKIADI |
| | | TIIIPYIGPALNIGNMLYKDDFVGALIFSG |
| | | AVILLEFIPEIAIPVLGTFALVSYIANKVL |
| | | TVQTIDNALSKRNEKWDEVYKYIVTNWLAK |
| | | VNTQIDLIRKKMKEALENQAEATKAIINYQ |
| | | YNQYTEEEKNNINFNIDDLSSKLNESINKA |
| | | MININKFLNQCSVSYLMNSMIPYGVKRLED |
| | | FDASLKDALLKYIYDNRGTLIGQVDRLKDK |
| | | VNNTLSTDIPFQLSKYVDNQRLLSTFTEYI |
| | | KNIINTSILNLRYESNHLIDLSRYASKINI |
| | | GSKVNFDPIDKNQIQLFNLESSKIEVILKN |
| | | AIVYNSMYENFSTSFWIRIPKYFNSISLNN |
| | | EYTIINCMENNSGWKVSLNYGEIIWTLQDT |
| | | QEIKQRVVFKYSQMINISDYINRWIFVTIT |
| | | NNRLTNSKIYINGRLIDQKPISNLGNIHAS |
| | | NNIMFKLDGCRDTHRYIWIKYFNLFDKELN |
| | | EKEIKDLYDNQSNSGILKDFWGDYLQYDKP |
| | | YYMLNLYDPNKYVDVNNVGIRGYMYLKGPR |
| | | GSVMTTNIYLNSSLYRGTKFIIKKYASGNK |
| | | DNIVRNNDRVYINVVVKNKEYRLATNASQA |
| | | GVEKILSALEIPDVGNLSQVVVMKSKNDQG |
| | | ITNKCKMNLQDNNGNDIGFIGFHQFNNIAK |
| | | LVASNWYNRQIERSSRTLGCSWEFIPVDDG |
| | | WGERPL |
| 12 | BoNT/ | MPFVNKQFNYKDPVNGVDIAYIKIPNAGQM |
| | A1-N1026K | QPVKAFKIHNKIWVIPERDTFTNPEEGDLN |
| | | PPPEAKQVPVSYYDSTYLSTDNEKDNYLKG |
| | | VTKLFERIYSTDLGRMLLTSIVRGIPFWGG |
| | | STIDTELKVIDTNCINVIQPDGSYRSEELN |
| | | LVIIGPSADIIQFECKSFGHEVLNLTRNGY |
| | | GSTQYIRFSPDFTFGFEESLEVDTNPLLGA |
| | | GKFATDPAVTLAHELIHAGHRLYGIAINPN |
| | | RVFKVNTNAYYEMSGLEVSFEELRTFGGHD |
| | | AKFIDSLQENEFRLYYYNKFKDIASTLNKA |
| | | KSIVGTTASLQYMKNVFKEKYLLSEDTSGK |
| | | FSVDKLKFDKLYKMLTEIYTEDNFVKFFKV |
| | | LNRKTYLNFDKAVFKINIVPKVNYTIYDGF |
| | | NLRNTNLAANFNGQNTEINNMNFTKLKNFT |
| | | GLFEFYKLLCVRGIITSKTKSLDKGYNKAL |
| | | NDLCIKVNNWDLFFSPSEDNFTNDLNKGEE |
| | | ITSDTNIEAAEENISLDLIQQYYLTFNFDN |
| | | EPENISIENLSSDIIGQLELMPNIERFPNG |
| | | KKYELDKYTMFHYLRAQEFEHGKSRIALTN |
| | | SVNEALLNPSRVYTFFSSDYVKKVNKATEA |
| | | AMFLGWVEQLVYDFTDETSEVSTTDKIADI |
| | | TIIIPYIGPALNIGNMLYKDDFVGALIFSG |
| | | AVILLEFIPEIAIPVLGTFALVSYIANKVL |
| | | TVQTIDNALSKRNEKWDEVYKYIVTNWLAK |
| | | VNTQIDLIRKKMKEALENQAEATKAIINYQ |
| | | YNQYTEEEKNNINFNIDDLSSKLNESINKA |
| | | MININKFLNQCSVSYLMNSMIPYGVKRLED |
| | | FDASLKDALLKYIYDNRGTLIGQVDRLKDK |
| | | VNNTLSTDIPFQLSKYVDNQRLLSTFTEYI |
| | | KNIINTSILNLRYESNHLIDLSRYASKINI |
| | | GSKVNFDPIDKNQIQLFNLESSKIEVILKN |
| | | AIVYNSMYENFSTSFWIRIPKYFNSISLNN |
| | | EYTIINCMENNSGWKVSLNYGEIIWTLQDT |
| | | QEIKQRVVFKYSQMINISDYINRWIFVTIT |
| | | NNRLNKSKIYINGRLIDQKPISNLGNIHAS |
| | | NNIMFKLDGCRDTHRYIWIKYFNLFDKELN |
| | | EKEIKDLYDNQSNSGILKDFWGDYLQYDKP |
| | | YYMLNLYDPNKYVDVNNVGIRGYMYLKGPR |
| | | GSVMTTNIYLNSSLYRGTKFIIKKYASGNK |
| | | DNIVRNNDRVYINVVVKNKEYRLATNASQA |
| | | GVEKILSALEIPDVGNLSQVVVMKSKNDQG |
| | | ITNKCKMNLQDNNGNDIGFIGFHQFNNIAK |
| | | LVASNWYNRQIERSSRTLGCSWEFIPVDDG |
| | | WGERPL |
| 13 | BoNT/ | MPFVNKQFNYKDPVNGVDIAYIKIPNAGQM |
| | A1-N1052K | QPVKAFKIHNKIWVIPERDTFTNPEEGDLN |
| | | PPPEAKQVPVSYYDSTYLSTDNEKDNYLKG |
| | | VTKLFERIYSTDLGRMLLTSIVRGIPFWGG |
| | | STIDTELKVIDTNCINVIQPDGSYRSEELN |
| | | LVIIGPSADIIQFECKSFGHEVLNLTRNGY |
| | | GSTQYIRFSPDFTFGFEESLEVDTNPLLGA |
| | | GKFATDPAVTLAHELIHAGHRLYGIAINPN |
| | | RVFKVNTNAYYEMSGLEVSFEELRTFGGHD |
| | | AKFIDSLQENEFRLYYYNKFKDIASTLNKA |
| | | KSIVGTTASLQYMKNVFKEKYLLSEDTSGK |
| | | FSVDKLKFDKLYKMLTEIYTEDNFVKFFKV |
| | | LNRKTYLNFDKAVFKINIVPKVNYTIYDGF |
| | | NLRNTNLAANFNGQNTEINNMNFTKLKNFT |
| | | GLFEFYKLLCVRGIITSKTKSLDKGYNKAL |
| | | NDLCIKVNNWDLFFSPSEDNFTNDLNKGEE |
| | | ITSDTNIEAAEENISLDLIQQYYLTFNFDN |
| | | EPENISIENLSSDIIGQLELMPNIERFPNG |
| | | KKYELDKYTMFHYLRAQEFEHGKSRIALTN |
| | | SVNEALLNPSRVYTFFSSDYVKKVNKATEA |
| | | AMFLGWVEQLVYDFTDETSEVSTTDKIADI |
| | | TIIIPYIGPALNIGNMLYKDDFVGALIFSG |
| | | AVILLEFIPEIAIPVLGTFALVSYIANKVL |
| | | TVQTIDNALSKRNEKWDEVYKYIVTNWLAK |
| | | VNTQIDLIRKKMKEALENQAEATKAIINYQ |
| | | YNQYTEEEKNNINFNIDDLSSKLNESINKA |
| | | MININKFLNQCSVSYLMNSMIPYGVKRLED |
| | | FDASLKDALLKYIYDNRGTLIGQVDRLKDK |
| | | VNNTLSTDIPFQLSKYVDNQRLLSTFTEYI |
| | | KNIINTSILNLRYESNHLIDLSRYASKINI |
| | | GSKVNFDPIDKNQIQLFNLESSKIEVILKN |
| | | AIVYNSMYENFSTSFWIRIPKYFNSISLNN |
| | | EYTIINCMENNSGWKVSLNYGEIIWTLQDT |
| | | QEIKQRVVFKYSQMINISDYINRWIFVTIT |
| | | NNRLNNSKIYINGRLIDQKPISNLGNIHAS |
| | | NKIMFKLDGCRDTHRYIWIKYFNLFDKELN |
| | | EKEIKDLYDNQSNSGILKDFWGDYLQYDKP |
| | | YYMLNLYDPNKYVDVNNVGIRGYMYLKGPR |
| | | GSVMTTNIYLNSSLYRGTKFIIKKYASGNK |
| | | DNIVRNNDRVYINVVVKNKEYRLATNASQA |
| | | GVEKILSALEIPDVGNLSQVVVMKSKNDQG |
| | | ITNKCKMNLQDNNGNDIGFIGFHQFNNIAK |
| | | LVASNWYNRQIERSSRTLGCSWEFIPVDDG |
| | | WGERPL |
| 14 | BoNT/ | MPFVNKQFNYKDPVNGVDIAYIKIPNAGQM |
| | A1-D1062E | QPVKAFKIHNKIWVIPERDTFTNPEEGDLN |
| | | PPPEAKQVPVSYYDSTYLSTDNEKDNYLKG |
| | | VTKLFERIYSTDLGRMLLTSIVRGIPFWGG |
| | | STIDTELKVIDTNCINVIQPDGSYRSEELN |
| | | LVIIGPSADIIQFECKSFGHEVLNLTRNGY |
| | | GSTQYIRFSPDFTFGFEESLEVDTNPLLGA |
| | | GKFATDPAVTLAHELIHAGHRLYGIAINPN |
| | | RVFKVNTNAYYEMSGLEVSFEELRTFGGHD |
| | | AKFIDSLQENEFRLYYYNKFKDIASTLNKA |
| | | KSIVGTTASLQYMKNVFKEKYLLSEDTSGK |
| | | FSVDKLKFDKLYKMLTEIYTEDNFVKFFKV |
| | | LNRKTYLNFDKAVFKINIVPKVNYTIYDGF |
| | | NLRNTNLAANFNGQNTEINNMNFTKLKNFT |
| | | GLFEFYKLLCVRGIITSKTKSLDKGYNKAL |
| | | NDLCIKVNNWDLFFSPSEDNFTNDLNKGEE |
| | | ITSDTNIEAAEENISLDLIQQYYLTFNFDN |
| | | EPENISIENLSSDIIGQLELMPNIERFPNG |
| | | KKYELDKYTMFHYLRAQEFEHGKSRIALTN |
| | | SVNEALLNPSRVYTFFSSDYVKKVNKATEA |
| | | AMFLGWVEQLVYDFTDETSEVSTTDKIADI |
| | | TIIIPYIGPALNIGNMLYKDDFVGALIFSG |
| | | AVILLEFIPEIAIPVLGTFALVSYIANKVL |
| | | TVQTIDNALSKRNEKWDEVYKYIVTNWLAK |
| | | VNTQIDLIRKKMKEALENQAEATKAIINYQ |
| | | YNQYTEEEKNNINFNIDDLSSKLNESINKA |
| | | MININKFLNQCSVSYLMNSMIPYGVKRLED |
| | | FDASLKDALLKYIYDNRGTLIGQVDRLKDK |
| | | VNNTLSTDIPFQLSKYVDNQRLLSTFTEYI |
| | | KNIINTSILNLRYESNHLIDLSRYASKINI |
| | | GSKVNFDPIDKNQIQLFNLESSKIEVILKN |
| | | AIVYNSMYENFSTSFWIRIPKYFNSISLNN |
| | | EYTIINCMENNSGWKVSLNYGEIIWTLQDT |
| | | QEIKQRVVFKYSQMINISDYINRWIFVTIT |
| | | NNRLNNSKIYINGRLIDQKPISNLGNIHAS |
| | | NNIMFKLDGCRETHRYIWIKYFNLFDKELN |
| | | EKEIKDLYDNQSNSGILKDFWGDYLQYDKP |
| | | YYMLNLYDPNKYVDVNNVGIRGYMYLKGPR |
| | | GSVMTTNIYLNSSLYRGTKFIIKKYASGNK |
| | | DNIVRNNDRVYINVVVKNKEYRLATNASQA |
| | | GVEKILSALEIPDVGNLSQVVVMKSKNDQG |
| | | ITNKCKMNLQDNNGNDIGFIGFHQFNNIAK |
| | | LVASNWYNRQIERSSRTLGCSWEFIPVDDG |
| | | WGERPL |
| 15 | BoNT/ | MPFVNKQFNYKDPVNGVDIAYIKIPNAGQM |
| | A1-T1063P | QPVKAFKIHNKIWVIPERDTFTNPEEGDLN |
| | | PPPEAKQVPVSYYDSTYLSTDNEKDNYLKG |
| | | VTKLFERIYSTDLGRMLLTSIVRGIPFWGG |
| | | STIDTELKVIDTNCINVIQPDGSYRSEELN |
| | | LVIIGPSADIIQFECKSFGHEVLNLTRNGY |
| | | GSTQYIRFSPDFTFGFEESLEVDTNPLLGA |
| | | GKFATDPAVTLAHELIHAGHRLYGIAINPN |
| | | RVFKVNTNAYYEMSGLEVSFEELRTFGGHD |
| | | AKFIDSLQENEFRLYYYNKFKDIASTLNKA |
| | | KSIVGTTASLQYMKNVFKEKYLLSEDTSGK |
| | | FSVDKLKFDKLYKMLTEIYTEDNFVKFFKV |
| | | LNRKTYLNFDKAVFKINIVPKVNYTIYDGF |
| | | NLRNTNLAANFNGQNTEINNMNFTKLKNFT |
| | | GLFEFYKLLCVRGIITSKTKSLDKGYNKAL |
| | | NDLCIKVNNWDLFFSPSEDNFTNDLNKGEE |
| | | ITSDTNIEAAEENISLDLIQQYYLTFNFDN |
| | | EPENISIENLSSDIIGQLELMPNIERFPNG |
| | | KKYELDKYTMFHYLRAQEFEHGKSRIALTN |
| | | SVNEALLNPSRVYTFFSSDYVKKVNKATEA |
| | | AMFLGWVEQLVYDFTDETSEVSTTDKIADI |
| | | TIIIPYIGPALNIGNMLYKDDFVGALIFSG |
| | | AVILLEFIPEIAIPVLGTFALVSYIANKVL |
| | | TVQTIDNALSKRNEKWDEVYKYIVTNWLAK |
| | | VNTQIDLIRKKMKEALENQAEATKAIINYQ |
| | | YNQYTEEEKNNINFNIDDLSSKLNESINKA |
| | | MININKFLNQCSVSYLMNSMIPYGVKRLED |
| | | FDASLKDALLKYIYDNRGTLIGQVDRLKDK |
| | | VNNTLSTDIPFQLSKYVDNQRLLSTFTEYI |
| | | KNIINTSILNLRYESNHLIDLSRYASKINI |
| | | GSKVNFDPIDKNQIQLFNLESSKIEVILKN |
| | | AIVYNSMYENFSTSFWIRIPKYFNSISLNN |
| | | EYTIINCMENNSGWKVSLNYGEIIWTLQDT |
| | | QEIKQRVVFKYSQMINISDYINRWIFVTIT |
| | | NNRLNNSKIYINGRLIDQKPISNLGNIHAS |
| | | NNIMFKLDGCRDPHRYIWIKYFNLFDKELN |
| | | EKEIKDLYDNQSNSGILKDFWGDYLQYDKP |
| | | YYMLNLYDPNKYVDVNNVGIRGYMYLKGPR |
| | | GSVMTTNIYLNSSLYRGTKFIIKKYASGNK |
| | | DNIVRNNDRVYINVVVKNKEYRLATNASQA |
| | | GVEKILSALEIPDVGNLSQVVVMKSKNDQG |
| | | ITNKCKMNLQDNNGNDIGFIGFHQFNNIAK |
| | | LVASNWYNRQIERSSRTLGCSWEFIPVDDG |
| | | WGERPL |
| 16 | BoNT/ | MPFVNKQFNYKDPVNGVDIAYIKIPNAGQM |
| | A1-H1064R | QPVKAFKIHNKIWVIPERDTFTNPEEGDLN |
| | | PPPEAKQVPVSYYDSTYLSTDNEKDNYLKG |
| | | VTKLFERIYSTDLGRMLLTSIVRGIPFWGG |
| | | STIDTELKVIDTNCINVIQPDGSYRSEELN |
| | | LVIIGPSADIIQFECKSFGHEVLNLTRNGY |
| | | GSTQYIRFSPDFTFGFEESLEVDTNPLLGA |
| | | GKFATDPAVTLAHELIHAGHRLYGIAINPN |
| | | RVFKVNTNAYYEMSGLEVSFEELRTFGGHD |
| | | AKFIDSLQENEFRLYYYNKFKDIASTLNKA |
| | | KSIVGTTASLQYMKNVFKEKYLLSEDTSGK |
| | | FSVDKLKFDKLYKMLTEIYTEDNFVKFFKV |
| | | LNRKTYLNFDKAVFKINIVPKVNYTIYDGF |
| | | NLRNTNLAANFNGQNTEINNMNFTKLKNFT |
| | | GLFEFYKLLCVRGIITSKTKSLDKGYNKAL |
| | | NDLCIKVNNWDLFFSPSEDNFTNDLNKGEE |
| | | ITSDTNIEAAEENISLDLIQQYYLTFNFDN |
| | | EPENISIENLSSDIIGQLELMPNIERFPNG |
| | | KKYELDKYTMFHYLRAQEFEHGKSRIALTN |
| | | SVNEALLNPSRVYTFFSSDYVKKVNKATEA |
| | | AMFLGWVEQLVYDFTDETSEVSTTDKIADI |
| | | TIIIPYIGPALNIGNMLYKDDFVGALIFSG |
| | | AVILLEFIPEIAIPVLGTFALVSYIANKVL |
| | | TVQTIDNALSKRNEKWDEVYKYIVTNWLAK |
| | | VNTQIDLIRKKMKEALENQAEATKAIINYQ |
| | | YNQYTEEEKNNINFNIDDLSSKLNESINKA |
| | | MININKFLNQCSVSYLMNSMIPYGVKRLED |
| | | FDASLKDALLKYIYDNRGTLIGQVDRLKDK |
| | | VNNTLSTDIPFQLSKYVDNQRLLSTFTEYI |
| | | KNIINTSILNLRYESNHLIDLSRYASKINI |
| | | GSKVNFDPIDKNQIQLFNLESSKIEVILKN |
| | | AIVYNSMYENFSTSFWIRIPKYFNSISLNN |
| | | EYTIINCMENNSGWKVSLNYGEIIWTLQDT |
| | | QEIKQRVVFKYSQMINISDYINRWIFVTIT |
| | | NNRLNNSKIYINGRLIDQKPISNLGNIHAS |
| | | NNIMFKLDGCRDTRRYIWIKYFNLFDKELN |
| | | EKEIKDLYDNQSNSGILKDFWGDYLQYDKP |
| | | YYMLNLYDPNKYVDVNNVGIRGYMYLKGPR |
| | | GSVMTTNIYLNSSLYRGTKFIIKKYASGNK |
| | | DNIVRNNDRVYINVVVKNKEYRLATNASQA |
| | | GVEKILSALEIPDVGNLSQVVVMKSKNDQG |
| | | ITNKCKMNLQDNNGNDIGFIGFHQFNNIAK |
| | | LVASNWYNRQIERSSRTLGCSWEFIPVDDG |
| | | WGERPL |
| 17 | BoNT/ | MPFVNKQFNYKDPVNGVDIAYIKIPNAGQM |
| | A1-H1064Q | QPVKAFKIHNKIWVIPERDTFTNPEEGDLN |
| | | PPPEAKQVPVSYYDSTYLSTDNEKDNYLKG |
| | | VTKLFERIYSTDLGRMLLTSIVRGIPFWGG |
| | | STIDTELKVIDTNCINVIQPDGSYRSEELN |
| | | LVIIGPSADIIQFECKSFGHEVLNLTRNGY |
| | | GSTQYIRFSPDFTFGFEESLEVDTNPLLGA |
| | | GKFATDPAVTLAHELIHAGHRLYGIAINPN |
| | | RVFKVNTNAYYEMSGLEVSFEELRTFGGHD |
| | | AKFIDSLQENEFRLYYYNKFKDIASTLNKA |
| | | KSIVGTTASLQYMKNVFKEKYLLSEDTSGK |
| | | FSVDKLKFDKLYKMLTEIYTEDNFVKFFKV |
| | | LNRKTYLNFDKAVFKINIVPKVNYTIYDGF |
| | | NLRNTNLAANFNGQNTEINNMNFTKLKNFT |
| | | GLFEFYKLLCVRGIITSKTKSLDKGYNKAL |
| | | NDLCIKVNNWDLFFSPSEDNFTNDLNKGEE |
| | | ITSDTNIEAAEENISLDLIQQYYLTFNFDN |
| | | EPENISIENLSSDIIGQLELMPNIERFPNG |
| | | KKYELDKYTMFHYLRAQEFEHGKSRIALTN |
| | | SVNEALLNPSRVYTFFSSDYVKKVNKATEA |
| | | AMFLGWVEQLVYDFTDETSEVSTTDKIADI |
| | | TIIIPYIGPALNIGNMLYKDDFVGALIFSG |
| | | AVILLEFIPEIAIPVLGTFALVSYIANKVL |
| | | TVQTIDNALSKRNEKWDEVYKYIVTNWLAK |
| | | VNTQIDLIRKKMKEALENQAEATKAIINYQ |
| | | YNQYTEEEKNNINFNIDDLSSKLNESINKA |
| | | MININKFLNQCSVSYLMNSMIPYGVKRLED |
| | | FDASLKDALLKYIYDNRGTLIGQVDRLKDK |
| | | VNNTLSTDIPFQLSKYVDNQRLLSTFTEYI |
| | | KNIINTSILNLRYESNHLIDLSRYASKINI |
| | | GSKVNFDPIDKNQIQLFNLESSKIEVILKN |
| | | AIVYNSMYENFSTSFWIRIPKYFNSISLNN |
| | | EYTIINCMENNSGWKVSLNYGEIIWTLQDT |
| | | QEIKQRVVFKYSQMINISDYINRWIFVTIT |
| | | NNRLNNSKIYINGRLIDQKPISNLGNIHAS |
| | | NNIMFKLDGCRDTQRYIWIKYFNLFDKELN |
| | | EKEIKDLYDNQSNSGILKDFWGDYLQYDKP |
| | | YYMLNLYDPNKYVDVNNVGIRGYMYLKGPR |
| | | GSVMTTNIYLNSSLYRGTKFIIKKYASGNK |
| | | DNIVRNNDRVYINVVVKNKEYRLATNASQA |
| | | GVEKILSALEIPDVGNLSQVVVMKSKNDQG |
| | | ITNKCKMNLQDNNGNDIGFIGFHQFNNIAK |
| | | LVASNWYNRQIERSSRTLGCSWEFIPVDDG |
| | | WGERPL |
| 18 | BoNT/ | MPFVNKQFNYKDPVNGVDIAYIKIPNAGQM |
| | A1-R1065N | QPVKAFKIHNKIWVIPERDTFTNPEEGDLN |
| | | PPPEAKQVPVSYYDSTYLSTDNEKDNYLKG |
| | | VTKLFERIYSTDLGRMLLTSIVRGIPFWGG |
| | | STIDTELKVIDTNCINVIQPDGSYRSEELN |
| | | LVIIGPSADIIQFECKSFGHEVLNLTRNGY |
| | | GSTQYIRFSPDFTFGFEESLEVDTNPLLGA |
| | | GKFATDPAVTLAHELIHAGHRLYGIAINPN |
| | | RVFKVNTNAYYEMSGLEVSFEELRTFGGHD |
| | | AKFIDSLQENEFRLYYYNKFKDIASTLNKA |
| | | KSIVGTTASLQYMKNVFKEKYLLSEDTSGK |
| | | FSVDKLKFDKLYKMLTEIYTEDNFVKFFKV |
| | | LNRKTYLNFDKAVFKINIVPKVNYTIYDGF |
| | | NLRNTNLAANFNGQNTEINNMNFTKLKNFT |
| | | GLFEFYKLLCVRGIITSKTKSLDKGYNKAL |
| | | NDLCIKVNNWDLFFSPSEDNFTNDLNKGEE |
| | | ITSDTNIEAAEENISLDLIQQYYLTFNFDN |
| | | EPENISIENLSSDIIGQLELMPNIERFPNG |
| | | KKYELDKYTMFHYLRAQEFEHGKSRIALTN |
| | | SVNEALLNPSRVYTFFSSDYVKKVNKATEA |
| | | AMFLGWVEQLVYDFTDETSEVSTTDKIADI |
| | | TIIIPYIGPALNIGNMLYKDDFVGALIFSG |
| | | AVILLEFIPEIAIPVLGTFALVSYIANKVL |
| | | TVQTIDNALSKRNEKWDEVYKYIVTNWLAK |
| | | VNTQIDLIRKKMKEALENQAEATKAIINYQ |
| | | YNQYTEEEKNNINFNIDDLSSKLNESINKA |
| | | MININKFLNQCSVSYLMNSMIPYGVKRLED |
| | | FDASLKDALLKYIYDNRGTLIGQVDRLKDK |
| | | VNNTLSTDIPFQLSKYVDNQRLLSTFTEYI |
| | | KNIINTSILNLRYESNHLIDLSRYASKINI |
| | | GSKVNFDPIDKNQIQLFNLESSKIEVILKN |
| | | AIVYNSMYENFSTSFWIRIPKYFNSISLNN |
| | | EYTIINCMENNSGWKVSLNYGEIIWTLQDT |
| | | QEIKQRVVFKYSQMINISDYINRWIFVTIT |
| | | NNRLNNSKIYINGRLIDQKPISNLGNIHAS |
| | | NNIMFKLDGCRDTHNYIWIKYFNLFDKELN |
| | | EKEIKDLYDNQSNSGILKDFWGDYLQYDKP |
| | | YYMLNLYDPNKYVDVNNVGIRGYMYLKGPR |
| | | GSVMTTNIYLNSSLYRGTKFIIKKYASGNK |
| | | DNIVRNNDRVYINVVVKNKEYRLATNASQA |
| | | GVEKILSALEIPDVGNLSQVVVMKSKNDQG |
| | | ITNKCKMNLQDNNGNDIGFIGFHQFNNIAK |
| | | LVASNWYNRQIERSSRTLGCSWEFIPVDDG |
| | | WGERPL |
| 19 | BoNT/ | MPFVNKQFNYKDPVNGVDIAYIKIPNAGQM |
| | A1-Y1066R | QPVKAFKIHNKIWVIPERDTFTNPEEGDLN |
| | | PPPEAKQVPVSYYDSTYLSTDNEKDNYLKG |
| | | VTKLFERIYSTDLGRMLLTSIVRGIPFWGG |
| | | STIDTELKVIDTNCINVIQPDGSYRSEELN |
| | | LVIIGPSADIIQFECKSFGHEVLNLTRNGY |
| | | GSTQYIRFSPDFTFGFEESLEVDTNPLLGA |
| | | GKFATDPAVTLAHELIHAGHRLYGIAINPN |
| | | RVFKVNTNAYYEMSGLEVSFEELRTFGGHD |
| | | AKFIDSLQENEFRLYYYNKFKDIASTLNKA |
| | | KSIVGTTASLQYMKNVFKEKYLLSEDTSGK |
| | | FSVDKLKFDKLYKMLTEIYTEDNFVKFFKV |
| | | LNRKTYLNFDKAVFKINIVPKVNYTIYDGF |
| | | NLRNTNLAANFNGQNTEINNMNFTKLKNFT |
| | | GLFEFYKLLCVRGIITSKTKSLDKGYNKAL |
| | | NDLCIKVNNWDLFFSPSEDNFTNDLNKGEE |
| | | ITSDTNIEAAEENISLDLIQQYYLTFNFDN |
| | | EPENISIENLSSDIIGQLELMPNIERFPNG |
| | | KKYELDKYTMFHYLRAQEFEHGKSRIALTN |
| | | SVNEALLNPSRVYTFFSSDYVKKVNKATEA |
| | | AMFLGWVEQLVYDFTDETSEVSTTDKIADI |
| | | TIIIPYIGPALNIGNMLYKDDFVGALIFSG |
| | | AVILLEFIPEIAIPVLGTFALVSYIANKVL |
| | | TVQTIDNALSKRNEKWDEVYKYIVTNWLAK |
| | | VNTQIDLIRKKMKEALENQAEATKAIINYQ |
| | | YNQYTEEEKNNINFNIDDLSSKLNESINKA |
| | | MININKFLNQCSVSYLMNSMIPYGVKRLED |
| | | FDASLKDALLKYIYDNRGTLIGQVDRLKDK |
| | | VNNTLSTDIPFQLSKYVDNQRLLSTFTEYI |
| | | KNIINTSILNLRYESNHLIDLSRYASKINI |
| | | GSKVNFDPIDKNQIQLFNLESSKIEVILKN |
| | | AIVYNSMYENFSTSFWIRIPKYFNSISLNN |
| | | EYTIINCMENNSGWKVSLNYGEIIWTLQDT |
| | | QEIKQRVVFKYSQMINISDYINRWIFVTIT |
| | | NNRLNNSKIYINGRLIDQKPISNLGNIHAS |
| | | NNIMFKLDGCRDTHRRIWIKYFNLFDKELN |
| | | EKEIKDLYDNQSNSGILKDFWGDYLQYDKP |
| | | YYMLNLYDPNKYVDVNNVGIRGYMYLKGPR |
| | | GSVMTTNIYLNSSLYRGTKFIIKKYASGNK |
| | | DNIVRNNDRVYINVVVKNKEYRLATNASQA |
| | | GVEKILSALEIPDVGNLSQVVVMKSKNDQG |
| | | ITNKCKMNLQDNNGNDIGFIGFHQFNNIAK |
| | | LVASNWYNRQIERSSRTLGCSWEFIPVDDG |
| | | WGERPL |
| 20 | BoNT/ | MPFVNKQFNYKDPVNGVDIAYIKIPNAGQM |
| | A1-Y1066K | QPVKAFKIHNKIWVIPERDTFTNPEEGDLN |
| | | PPPEAKQVPVSYYDSTYLSTDNEKDNYLKG |
| | | VTKLFERIYSTDLGRMLLTSIVRGIPFWGG |
| | | STIDTELKVIDTNCINVIQPDGSYRSEELN |
| | | LVIIGPSADIIQFECKSFGHEVLNLTRNGY |
| | | GSTQYIRFSPDFTFGFEESLEVDTNPLLGA |
| | | GKFATDPAVTLAHELIHAGHRLYGIAINPN |
| | | RVFKVNTNAYYEMSGLEVSFEELRTFGGHD |
| | | AKFIDSLQENEFRLYYYNKFKDIASTLNKA |
| | | KSIVGTTASLQYMKNVFKEKYLLSEDTSGK |
| | | FSVDKLKFDKLYKMLTEIYTEDNFVKFFKV |
| | | LNRKTYLNFDKAVFKINIVPKVNYTIYDGF |
| | | NLRNTNLAANFNGQNTEINNMNFTKLKNFT |
| | | GLFEFYKLLCVRGIITSKTKSLDKGYNKAL |
| | | NDLCIKVNNWDLFFSPSEDNFTNDLNKGEE |
| | | ITSDTNIEAAEENISLDLIQQYYLTFNFDN |
| | | EPENISIENLSSDIIGQLELMPNIERFPNG |
| | | KKYELDKYTMFHYLRAQEFEHGKSRIALTN |
| | | SVNEALLNPSRVYTFFSSDYVKKVNKATEA |
| | | AMFLGWVEQLVYDFTDETSEVSTTDKIADI |
| | | TIIIPYIGPALNIGNMLYKDDFVGALIFSG |
| | | AVILLEFIPEIAIPVLGTFALVSYIANKVL |
| | | TVQTIDNALSKRNEKWDEVYKYIVTNWLAK |
| | | VNTQIDLIRKKMKEALENQAEATKAIINYQ |
| | | YNQYTEEEKNNINFNIDDLSSKLNESINKA |
| | | MININKFLNQCSVSYLMNSMIPYGVKRLED |
| | | FDASLKDALLKYIYDNRGTLIGQVDRLKDK |
| | | VNNTLSTDIPFQLSKYVDNQRLLSTFTEYI |
| | | KNIINTSILNLRYESNHLIDLSRYASKINI |
| | | GSKVNFDPIDKNQIQLFNLESSKIEVILKN |
| | | AIVYNSMYENFSTSFWIRIPKYFNSISLNN |
| | | EYTIINCMENNSGWKVSLNYGEIIWTLQDT |
| | | QEIKQRVVFKYSQMINISDYINRWIFVTIT |
| | | NNRLNNSKIYINGRLIDQKPISNLGNIHAS |
| | | NNIMFKLDGCRDTHRKIWIKYFNLFDKELN |
| | | EKEIKDLYDNQSNSGILKDFWGDYLQYDKP |
| | | YYMLNLYDPNKYVDVNNVGIRGYMYLKGPR |
| | | GSVMTTNIYLNSSLYRGTKFIIKKYASGNK |
| | | DNIVRNNDRVYINVVVKNKEYRLATNASQA |
| | | GVEKILSALEIPDVGNLSQVVVMKSKNDQG |
| | | ITNKCKMNLQDNNGNDIGFIGFHQFNNIAK |
| | | LVASNWYNRQIERSSRTLGCSWEFIPVDDG |
| | | WGERPL |
| 21 | BoNT/ | MPFVNKQFNYKDPVNGVDIAYIKIPNAGQM |
| | A1-T1145Y | QPVKAFKIHNKIWVIPERDTFTNPEEGDLN |
| | | PPPEAKQVPVSYYDSTYLSTDNEKDNYLKG |
| | | VTKLFERIYSTDLGRMLLTSIVRGIPFWGG |
| | | STIDTELKVIDTNCINVIQPDGSYRSEELN |
| | | LVIIGPSADIIQFECKSFGHEVLNLTRNGY |
| | | GSTQYIRFSPDFTFGFEESLEVDTNPLLGA |
| | | GKFATDPAVTLAHELIHAGHRLYGIAINPN |
| | | RVFKVNTNAYYEMSGLEVSFEELRTFGGHD |
| | | AKFIDSLQENEFRLYYYNKFKDIASTLNKA |
| | | KSIVGTTASLQYMKNVFKEKYLLSEDTSGK |
| | | FSVDKLKFDKLYKMLTEIYTEDNFVKFFKV |
| | | LNRKTYLNFDKAVFKINIVPKVNYTIYDGF |
| | | NLRNTNLAANFNGQNTEINNMNFTKLKNFT |
| | | GLFEFYKLLCVRGIITSKTKSLDKGYNKAL |
| | | NDLCIKVNNWDLFFSPSEDNFTNDLNKGEE |
| | | ITSDTNIEAAEENISLDLIQQYYLTFNFDN |
| | | EPENISIENLSSDIIGQLELMPNIERFPNG |
| | | KKYELDKYTMFHYLRAQEFEHGKSRIALTN |
| | | SVNEALLNPSRVYTFFSSDYVKKVNKATEA |
| | | AMFLGWVEQLVYDFTDETSEVSTTDKIADI |
| | | TIIIPYIGPALNIGNMLYKDDFVGALIFSG |
| | | AVILLEFIPEIAIPVLGTFALVSYIANKVL |
| | | TVQTIDNALSKRNEKWDEVYKYIVTNWLAK |
| | | VNTQIDLIRKKMKEALENQAEATKAIINYQ |
| | | YNQYTEEEKNNINFNIDDLSSKLNESINKA |
| | | MININKFLNQCSVSYLMNSMIPYGVKRLED |
| | | FDASLKDALLKYIYDNRGTLIGQVDRLKDK |
| | | VNNTLSTDIPFQLSKYVDNQRLLSTFTEYI |
| | | KNIINTSILNLRYESNHLIDLSRYASKINI |
| | | GSKVNFDPIDKNQIQLFNLESSKIEVILKN |
| | | AIVYNSMYENFSTSFWIRIPKYFNSISLNN |
| | | EYTIINCMENNSGWKVSLNYGEIIWTLQDT |
| | | QEIKQRVVFKYSQMINISDYINRWIFVTIT |
| | | NNRLNNSKIYINGRLIDQKPISNLGNIHAS |
| | | NNIMFKLDGCRDTHRYIWIKYFNLFDKELN |
| | | EKEIKDLYDNQSNSGILKDFWGDYLQYDKP |
| | | YYMLNLYDPNKYVDVNNVGIRGYMYLKGPR |
| | | GSVMYTNIYLNSSLYRGTKFIIKKYASGNK |
| | | DNIVRNNDRVYINVVVKNKEYRLATNASQA |
| | | GVEKILSALEIPDVGNLSQVVVMKSKNDQG |
| | | ITNKCKMNLQDNNGNDIGFIGFHQFNNIAK |
| | | LVASNWYNRQIERSSRTLGCSWEFIPVDDG |
| | | WGERPL |
| 22 | BoNT/ | MPFVNKQFNYKDPVNGVDIAYIKIPNAGQM |
| | A1-R1156M | QPVKAFKIHNKIWVIPERDTFTNPEEGDLN |
| | | PPPEAKQVPVSYYDSTYLSTDNEKDNYLKG |
| | | VTKLFERIYSTDLGRMLLTSIVRGIPFWGG |
| | | STIDTELKVIDTNCINVIQPDGSYRSEELN |
| | | LVIIGPSADIIQFECKSFGHEVLNLTRNGY |
| | | GSTQYIRFSPDFTFGFEESLEVDTNPLLGA |
| | | GKFATDPAVTLAHELIHAGHRLYGIAINPN |
| | | RVFKVNTNAYYEMSGLEVSFEELRTFGGHD |
| | | AKFIDSLQENEFRLYYYNKFKDIASTLNKA |
| | | KSIVGTTASLQYMKNVFKEKYLLSEDTSGK |
| | | FSVDKLKFDKLYKMLTEIYTEDNFVKFFKV |
| | | LNRKTYLNFDKAVFKINIVPKVNYTIYDGF |
| | | NLRNTNLAANFNGQNTEINNMNFTKLKNFT |
| | | GLFEFYKLLCVRGIITSKTKSLDKGYNKAL |
| | | NDLCIKVNNWDLFFSPSEDNFTNDLNKGEE |
| | | ITSDTNIEAAEENISLDLIQQYYLTFNFDN |
| | | EPENISIENLSSDIIGQLELMPNIERFPNG |
| | | KKYELDKYTMFHYLRAQEFEHGKSRIALTN |
| | | SVNEALLNPSRVYTFFSSDYVKKVNKATEA |
| | | AMFLGWVEQLVYDFTDETSEVSTTDKIADI |
| | | TIIIPYIGPALNIGNMLYKDDFVGALIFSG |
| | | AVILLEFIPEIAIPVLGTFALVSYIANKVL |
| | | TVQTIDNALSKRNEKWDEVYKYIVTNWLAK |
| | | VNTQIDLIRKKMKEALENQAEATKAIINYQ |
| | | YNQYTEEEKNNINFNIDDLSSKLNESINKA |
| | | MININKFLNQCSVSYLMNSMIPYGVKRLED |
| | | FDASLKDALLKYIYDNRGTLIGQVDRLKDK |
| | | VNNTLSTDIPFQLSKYVDNQRLLSTFTEYI |
| | | KNIINTSILNLRYESNHLIDLSRYASKINI |
| | | GSKVNFDPIDKNQIQLFNLESSKIEVILKN |
| | | AIVYNSMYENFSTSFWIRIPKYFNSISLNN |
| | | EYTIINCMENNSGWKVSLNYGEIIWTLQDT |
| | | QEIKQRVVFKYSQMINISDYINRWIFVTIT |
| | | NNRLNNSKIYINGRLIDQKPISNLGNIHAS |
| | | NNIMFKLDGCRDTHRYIWIKYFNLFDKELN |
| | | EKEIKDLYDNQSNSGILKDFWGDYLQYDKP |
| | | YYMLNLYDPNKYVDVNNVGIRGYMYLKGPR |
| | | GSVMTTNIYLNSSLYMGTKFIIKKYASGNK |
| | | DNIVRNNDRVYINVVVKNKEYRLATNASQA |
| | | GVEKILSALEIPDVGNLSQVVVMKSKNDQG |
| | | ITNKCKMNLQDNNGNDIGFIGFHQFNNIAK |
| | | LVASNWYNRQIERSSRTLGCSWEFIPVDDG |
| | | WGERPL |
| 23 | BoNT/ | MPFVNKQFNYKDPVNGVDIAYIKIPNAGQM |
| | A1-R11561 | QPVKAFKIHNKIWVIPERDTFTNPEEGDLN |
| | | PPPEAKQVPVSYYDSTYLSTDNEKDNYLKG |
| | | VTKLFERIYSTDLGRMLLTSIVRGIPFWGG |
| | | STIDTELKVIDTNCINVIQPDGSYRSEELN |
| | | LVIIGPSADIIQFECKSFGHEVLNLTRNGY |
| | | GSTQYIRFSPDFTFGFEESLEVDTNPLLGA |
| | | GKFATDPAVTLAHELIHAGHRLYGIAINPN |
| | | RVFKVNTNAYYEMSGLEVSFEELRTFGGHD |
| | | AKFIDSLQENEFRLYYYNKFKDIASTLNKA |
| | | KSIVGTTASLQYMKNVFKEKYLLSEDTSGK |
| | | FSVDKLKFDKLYKMLTEIYTEDNFVKFFKV |
| | | LNRKTYLNFDKAVFKINIVPKVNYTIYDGF |
| | | NLRNTNLAANFNGQNTEINNMNFTKLKNFT |
| | | GLFEFYKLLCVRGIITSKTKSLDKGYNKAL |
| | | NDLCIKVNNWDLFFSPSEDNFTNDLNKGEE |
| | | ITSDTNIEAAEENISLDLIQQYYLTFNFDN |
| | | EPENISIENLSSDIIGQLELMPNIERFPNG |
| | | KKYELDKYTMFHYLRAQEFEHGKSRIALTN |
| | | SVNEALLNPSRVYTFFSSDYVKKVNKATEA |
| | | AMFLGWVEQLVYDFTDETSEVSTTDKIADI |
| | | TIIIPYIGPALNIGNMLYKDDFVGALIFSG |
| | | AVILLEFIPEIAIPVLGTFALVSYIANKVL |
| | | TVQTIDNALSKRNEKWDEVYKYIVTNWLAK |
| | | VNTQIDLIRKKMKEALENQAEATKAIINYQ |
| | | YNQYTEEEKNNINFNIDDLSSKLNESINKA |
| | | MININKFLNQCSVSYLMNSMIPYGVKRLED |
| | | FDASLKDALLKYIYDNRGTLIGQVDRLKDK |
| | | VNNTLSTDIPFQLSKYVDNQRLLSTFTEYI |
| | | KNIINTSILNLRYESNHLIDLSRYASKINI |
| | | GSKVNFDPIDKNQIQLFNLESSKIEVILKN |
| | | AIVYNSMYENFSTSFWIRIPKYFNSISLNN |
| | | EYTIINCMENNSGWKVSLNYGEIIWTLQDT |
| | | QEIKQRVVFKYSQMINISDYINRWIFVTIT |
| | | NNRLNNSKIYINGRLIDQKPISNLGNIHAS |
| | | NNIMFKLDGCRDTHRYIWIKYFNLFDKELN |
| | | EKEIKDLYDNQSNSGILKDFWGDYLQYDKP |
| | | YYMLNLYDPNKYVDVNNVGIRGYMYLKGPR |
| | | GSVMTTNIYLNSSLYIGTKFIIKKYASGNK |
| | | DNIVRNNDRVYINVVVKNKEYRLATNASQA |
| | | GVEKILSALEIPDVGNLSQVVVMKSKNDQG |
| | | ITNKCKMNLQDNNGNDIGFIGFHQFNNIAK |
| | | LVASNWYNRQIERSSRTLGCSWEFIPVDDG |
| | | WGERPL |
| 24 | BoNT/ | MPFVNKQFNYKDPVNGVDIAYIKIPNAGQM |
| | A1-T1232R | QPVKAFKIHNKIWVIPERDTFTNPEEGDLN |
| | | PPPEAKQVPVSYYDSTYLSTDNEKDNYLKG |
| | | VTKLFERIYSTDLGRMLLTSIVRGIPFWGG |
| | | STIDTELKVIDTNCINVIQPDGSYRSEELN |
| | | LVIIGPSADIIQFECKSFGHEVLNLTRNGY |
| | | GSTQYIRFSPDFTFGFEESLEVDTNPLLGA |
| | | GKFATDPAVTLAHELIHAGHRLYGIAINPN |
| | | RVFKVNTNAYYEMSGLEVSFEELRTFGGHD |
| | | AKFIDSLQENEFRLYYYNKFKDIASTLNKA |
| | | KSIVGTTASLQYMKNVFKEKYLLSEDTSGK |
| | | FSVDKLKFDKLYKMLTEIYTEDNFVKFFKV |
| | | LNRKTYLNFDKAVFKINIVPKVNYTIYDGF |
| | | NLRNTNLAANFNGQNTEINNMNFTKLKNFT |
| | | GLFEFYKLLCVRGIITSKTKSLDKGYNKAL |
| | | NDLCIKVNNWDLFFSPSEDNFTNDLNKGEE |
| | | ITSDTNIEAAEENISLDLIQQYYLTFNFDN |
| | | EPENISIENLSSDIIGQLELMPNIERFPNG |
| | | KKYELDKYTMFHYLRAQEFEHGKSRIALTN |
| | | SVNEALLNPSRVYTFFSSDYVKKVNKATEA |
| | | AMFLGWVEQLVYDFTDETSEVSTTDKIADI |
| | | TIIIPYIGPALNIGNMLYKDDFVGALIFSG |
| | | AVILLEFIPEIAIPVLGTFALVSYIANKVL |
| | | TVQTIDNALSKRNEKWDEVYKYIVTNWLAK |
| | | VNTQIDLIRKKMKEALENQAEATKAIINYQ |
| | | YNQYTEEEKNNINFNIDDLSSKLNESINKA |
| | | MININKFLNQCSVSYLMNSMIPYGVKRLED |
| | | FDASLKDALLKYIYDNRGTLIGQVDRLKDK |
| | | VNNTLSTDIPFQLSKYVDNQRLLSTFTEYI |
| | | KNIINTSILNLRYESNHLIDLSRYASKINI |
| | | GSKVNFDPIDKNQIQLFNLESSKIEVILKN |
| | | AIVYNSMYENFSTSFWIRIPKYFNSISLNN |
| | | EYTIINCMENNSGWKVSLNYGEIIWTLQDT |
| | | QEIKQRVVFKYSQMINISDYINRWIFVTIT |
| | | NNRLNNSKIYINGRLIDQKPISNLGNIHAS |
| | | NNIMFKLDGCRDTHRYIWIKYFNLFDKELN |
| | | EKEIKDLYDNQSNSGILKDFWGDYLQYDKP |
| | | YYMLNLYDPNKYVDVNNVGIRGYMYLKGPR |
| | | GSVMTTNIYLNSSLYRGTKFIIKKYASGNK |
| | | DNIVRNNDRVYINVVVKNKEYRLATNASQA |
| | | GVEKILSALEIPDVGNLSQVVVMKSKNDQG |
| | | IRNKCKMNLQDNNGNDIGFIGFHQFNNIAK |
| | | LVASNWYNRQIERSSRTLGCSWEFIPVDDG |
| | | WGERPL |
| 25 | BoNT/ | MPFVNKQFNYKDPVNGVDIAYIKIPNAGQM |
| | A1-T1232K | QPVKAFKIHNKIWVIPERDTFTNPEEGDLN |
| | | PPPEAKQVPVSYYDSTYLSTDNEKDNYLKG |
| | | VTKLFERIYSTDLGRMLLTSIVRGIPFWGG |
| | | STIDTELKVIDTNCINVIQPDGSYRSEELN |
| | | LVIIGPSADIIQFECKSFGHEVLNLTRNGY |
| | | GSTQYIRFSPDFTFGFEESLEVDTNPLLGA |
| | | GKFATDPAVTLAHELIHAGHRLYGIAINPN |
| | | RVFKVNTNAYYEMSGLEVSFEELRTFGGHD |
| | | AKFIDSLQENEFRLYYYNKFKDIASTLNKA |
| | | KSIVGTTASLQYMKNVFKEKYLLSEDTSGK |
| | | FSVDKLKFDKLYKMLTEIYTEDNFVKFFKV |
| | | LNRKTYLNFDKAVFKINIVPKVNYTIYDGF |
| | | NLRNTNLAANFNGQNTEINNMNFTKLKNFT |
| | | GLFEFYKLLCVRGIITSKTKSLDKGYNKAL |
| | | NDLCIKVNNWDLFFSPSEDNFTNDLNKGEE |
| | | ITSDTNIEAAEENISLDLIQQYYLTFNFDN |
| | | EPENISIENLSSDIIGQLELMPNIERFPNG |
| | | KKYELDKYTMFHYLRAQEFEHGKSRIALTN |
| | | SVNEALLNPSRVYTFFSSDYVKKVNKATEA |
| | | AMFLGWVEQLVYDFTDETSEVSTTDKIADI |
| | | TIIIPYIGPALNIGNMLYKDDFVGALIFSG |
| | | AVILLEFIPEIAIPVLGTFALVSYIANKVL |
| | | TVQTIDNALSKRNEKWDEVYKYIVTNWLAK |
| | | VNTQIDLIRKKMKEALENQAEATKAIINYQ |
| | | YNQYTEEEKNNINFNIDDLSSKLNESINKA |
| | | MININKFLNQCSVSYLMNSMIPYGVKRLED |
| | | FDASLKDALLKYIYDNRGTLIGQVDRLKDK |
| | | VNNTLSTDIPFQLSKYVDNQRLLSTFTEYI |
| | | KNIINTSILNLRYESNHLIDLSRYASKINI |
| | | GSKVNFDPIDKNQIQLFNLESSKIEVILKN |
| | | AIVYNSMYENFSTSFWIRIPKYFNSISLNN |
| | | EYTIINCMENNSGWKVSLNYGEIIWTLQDT |
| | | QEIKQRVVFKYSQMINISDYINRWIFVTIT |
| | | NNRLNNSKIYINGRLIDQKPISNLGNIHAS |
| | | NNIMFKLDGCRDTHRYIWIKYFNLFDKELN |
| | | EKEIKDLYDNQSNSGILKDFWGDYLQYDKP |
| | | YYMLNLYDPNKYVDVNNVGIRGYMYLKGPR |
| | | GSVMTTNIYLNSSLYRGTKFIIKKYASGNK |
| | | DNIVRNNDRVYINVVVKNKEYRLATNASQA |
| | | GVEKILSALEIPDVGNLSQVVVMKSKNDQG |
| | | IKNKCKMNLQDNNGNDIGFIGFHQFNNIAK |
| | | LVASNWYNRQIERSSRTLGCSWEFIPVDDG |
| | | WGERPL |
| 26 | BoNT/ | MPFVNKQFNYKDPVNGVDIAYIKIPNAGQM |
| | A1-E1272G | QPVKAFKIHNKIWVIPERDTFTNPEEGDLN |
| | | PPPEAKQVPVSYYDSTYLSTDNEKDNYLKG |
| | | VTKLFERIYSTDLGRMLLTSIVRGIPFWGG |
| | | STIDTELKVIDTNCINVIQPDGSYRSEELN |
| | | LVIIGPSADIIQFECKSFGHEVLNLTRNGY |
| | | GSTQYIRFSPDFTFGFEESLEVDTNPLLGA |
| | | GKFATDPAVTLAHELIHAGHRLYGIAINPN |
| | | RVFKVNTNAYYEMSGLEVSFEELRTFGGHD |
| | | AKFIDSLQENEFRLYYYNKFKDIASTLNKA |
| | | KSIVGTTASLQYMKNVFKEKYLLSEDTSGK |
| | | FSVDKLKFDKLYKMLTEIYTEDNFVKFFKV |
| | | LNRKTYLNFDKAVFKINIVPKVNYTIYDGF |
| | | NLRNTNLAANFNGQNTEINNMNFTKLKNFT |
| | | GLFEFYKLLCVRGIITSKTKSLDKGYNKAL |
| | | NDLCIKVNNWDLFFSPSEDNFTNDLNKGEE |
| | | ITSDTNIEAAEENISLDLIQQYYLTFNFDN |
| | | EPENISIENLSSDIIGQLELMPNIERFPNG |
| | | KKYELDKYTMFHYLRAQEFEHGKSRIALTN |
| | | SVNEALLNPSRVYTFFSSDYVKKVNKATEA |
| | | AMFLGWVEQLVYDFTDETSEVSTTDKIADI |
| | | TIIIPYIGPALNIGNMLYKDDFVGALIFSG |
| | | AVILLEFIPEIAIPVLGTFALVSYIANKVL |
| | | TVQTIDNALSKRNEKWDEVYKYIVTNWLAK |
| | | VNTQIDLIRKKMKEALENQAEATKAIINYQ |
| | | YNQYTEEEKNNINFNIDDLSSKLNESINKA |
| | | MININKFLNQCSVSYLMNSMIPYGVKRLED |
| | | FDASLKDALLKYIYDNRGTLIGQVDRLKDK |
| | | VNNTLSTDIPFQLSKYVDNQRLLSTFTEYI |
| | | KNIINTSILNLRYESNHLIDLSRYASKINI |
| | | GSKVNFDPIDKNQIQLFNLESSKIEVILKN |
| | | AIVYNSMYENFSTSFWIRIPKYFNSISLNN |
| | | EYTIINCMENNSGWKVSLNYGEIIWTLQDT |
| | | QEIKQRVVFKYSQMINISDYINRWIFVTIT |
| | | NNRLNNSKIYINGRLIDQKPISNLGNIHAS |
| | | NNIMFKLDGCRDTHRYIWIKYFNLFDKELN |
| | | EKEIKDLYDNQSNSGILKDFWGDYLQYDKP |
| | | YYMLNLYDPNKYVDVNNVGIRGYMYLKGPR |
| | | GSVMTTNIYLNSSLYRGTKFIIKKYASGNK |
| | | DNIVRNNDRVYINVVVKNKEYRLATNASQA |
| | | GVEKILSALEIPDVGNLSQVVVMKSKNDQG |
| | | ITNKCKMNLQDNNGNDIGFIGFHQFNNIAK |
| | | LVASNWYNRQIGRSSRTLGCSWEFIPVDDG |
| | | WGERPL |
| 27 | BoNT/ | MPFVNKQFNYKDPVNGVDIAYIKIPNAGQM |
| | A1-L1278F | QPVKAFKIHNKIWVIPERDTFTNPEEGDLN |
| | | PPPEAKQVPVSYYDSTYLSTDNEKDNYLKG |
| | | VTKLFERIYSTDLGRMLLTSIVRGIPFWGG |
| | | STIDTELKVIDTNCINVIQPDGSYRSEELN |
| | | LVIIGPSADIIQFECKSFGHEVLNLTRNGY |
| | | GSTQYIRFSPDFTFGFEESLEVDTNPLLGA |
| | | GKFATDPAVTLAHELIHAGHRLYGIAINPN |
| | | RVFKVNTNAYYEMSGLEVSFEELRTFGGHD |
| | | AKFIDSLQENEFRLYYYNKFKDIASTLNKA |
| | | KSIVGTTASLQYMKNVFKEKYLLSEDTSGK |
| | | FSVDKLKFDKLYKMLTEIYTEDNFVKFFKV |
| | | LNRKTYLNFDKAVFKINIVPKVNYTIYDGF |
| | | NLRNTNLAANFNGQNTEINNMNFTKLKNFT |
| | | GLFEFYKLLCVRGIITSKTKSLDKGYNKAL |
| | | NDLCIKVNNWDLFFSPSEDNFTNDLNKGEE |
| | | ITSDTNIEAAEENISLDLIQQYYLTFNFDN |
| | | EPENISIENLSSDIIGQLELMPNIERFPNG |
| | | KKYELDKYTMFHYLRAQEFEHGKSRIALTN |
| | | SVNEALLNPSRVYTFFSSDYVKKVNKATEA |
| | | AMFLGWVEQLVYDFTDETSEVSTTDKIADI |
| | | TIIIPYIGPALNIGNMLYKDDFVGALIFSG |
| | | AVILLEFIPEIAIPVLGTFALVSYIANKVL |
| | | TVQTIDNALSKRNEKWDEVYKYIVTNWLAK |
| | | VNTQIDLIRKKMKEALENQAEATKAIINYQ |
| | | YNQYTEEEKNNINFNIDDLSSKLNESINKA |
| | | MININKFLNQCSVSYLMNSMIPYGVKRLED |
| | | FDASLKDALLKYIYDNRGTLIGQVDRLKDK |
| | | VNNTLSTDIPFQLSKYVDNQRLLSTFTEYI |
| | | KNIINTSILNLRYESNHLIDLSRYASKINI |
| | | GSKVNFDPIDKNQIQLFNLESSKIEVILKN |
| | | AIVYNSMYENFSTSFWIRIPKYFNSISLNN |
| | | EYTIINCMENNSGWKVSLNYGEIIWTLQDT |
| | | QEIKQRVVFKYSQMINISDYINRWIFVTIT |
| | | NNRLNNSKIYINGRLIDQKPISNLGNIHAS |
| | | NNIMFKLDGCRDTHRYIWIKYFNLFDKELN |
| | | EKEIKDLYDNQSNSGILKDFWGDYLQYDKP |
| | | YYMLNLYDPNKYVDVNNVGIRGYMYLKGPR |
| | | GSVMTTNIYLNSSLYRGTKFIIKKYASGNK |
| | | DNIVRNNDRVYINVVVKNKEYRLATNASQA |
| | | GVEKILSALEIPDVGNLSQVVVMKSKNDQG |
| | | ITNKCKMNLQDNNGNDIGFIGFHQFNNIAK |
| | | LVASNWYNRQIERSSRTFGCSWEFIPVDDG |
| | | WGERPL |
| 28 | BoNT/ | MPFVNKQFNYKDPVNGVDIAYIKIPNAGQM |
| | A1-L1278Y | QPVKAFKIHNKIWVIPERDTFTNPEEGDLN |
| | | PPPEAKQVPVSYYDSTYLSTDNEKDNYLKG |
| | | VTKLFERIYSTDLGRMLLTSIVRGIPFWGG |
| | | STIDTELKVIDTNCINVIQPDGSYRSEELN |
| | | LVIIGPSADIIQFECKSFGHEVLNLTRNGY |
| | | GSTQYIRFSPDFTFGFEESLEVDTNPLLGA |
| | | GKFATDPAVTLAHELIHAGHRLYGIAINPN |
| | | RVFKVNTNAYYEMSGLEVSFEELRTFGGHD |
| | | AKFIDSLQENEFRLYYYNKFKDIASTLNKA |
| | | KSIVGTTASLQYMKNVFKEKYLLSEDTSGK |
| | | FSVDKLKFDKLYKMLTEIYTEDNFVKFFKV |
| | | LNRKTYLNFDKAVFKINIVPKVNYTIYDGF |
| | | NLRNTNLAANFNGQNTEINNMNFTKLKNFT |
| | | GLFEFYKLLCVRGIITSKTKSLDKGYNKAL |
| | | NDLCIKVNNWDLFFSPSEDNFTNDLNKGEE |
| | | ITSDTNIEAAEENISLDLIQQYYLTFNFDN |
| | | EPENISIENLSSDIIGQLELMPNIERFPNG |
| | | KKYELDKYTMFHYLRAQEFEHGKSRIALTN |
| | | SVNEALLNPSRVYTFFSSDYVKKVNKATEA |
| | | AMFLGWVEQLVYDFTDETSEVSTTDKIADI |
| | | TIIIPYIGPALNIGNMLYKDDFVGALIFSG |
| | | AVILLEFIPEIAIPVLGTFALVSYIANKVL |
| | | TVQTIDNALSKRNEKWDEVYKYIVTNWLAK |
| | | VNTQIDLIRKKMKEALENQAEATKAIINYQ |
| | | YNQYTEEEKNNINFNIDDLSSKLNESINKA |
| | | MININKFLNQCSVSYLMNSMIPYGVKRLED |
| | | FDASLKDALLKYIYDNRGTLIGQVDRLKDK |
| | | VNNTLSTDIPFQLSKYVDNQRLLSTFTEYI |
| | | KNIINTSILNLRYESNHLIDLSRYASKINI |
| | | GSKVNFDPIDKNQIQLFNLESSKIEVILKN |
| | | AIVYNSMYENFSTSFWIRIPKYFNSISLNN |
| | | EYTIINCMENNSGWKVSLNYGEIIWTLQDT |
| | | QEIKQRVVFKYSQMINISDYINRWIFVTIT |
| | | NNRLNNSKIYINGRLIDQKPISNLGNIHAS |
| | | NNIMFKLDGCRDTHRYIWIKYFNLFDKELN |
| | | EKEIKDLYDNQSNSGILKDFWGDYLQYDKP |
| | | YYMLNLYDPNKYVDVNNVGIRGYMYLKGPR |
| | | GSVMTTNIYLNSSLYRGTKFIIKKYASGNK |
| | | DNIVRNNDRVYINVVVKNKEYRLATNASQA |
| | | GVEKILSALEIPDVGNLSQVVVMKSKNDQG |
| | | ITNKCKMNLQDNNGNDIGFIGFHQFNNIAK |
| | | LVASNWYNRQIERSSRTYGCSWEFIPVDDG |
| | | WGERPL |
| 29 | BoNT/ | MPFVNKQFNYKDPVNGVDIAYIKIPNAGQM |
| | A1-L1278W | QPVKAFKIHNKIWVIPERDTFTNPEEGDLN |
| | | PPPEAKQVPVSYYDSTYLSTDNEKDNYLKG |
| | | VTKLFERIYSTDLGRMLLTSIVRGIPFWGG |
| | | STIDTELKVIDTNCINVIQPDGSYRSEELN |
| | | LVIIGPSADIIQFECKSFGHEVLNLTRNGY |
| | | GSTQYIRFSPDFTFGFEESLEVDTNPLLGA |
| | | GKFATDPAVTLAHELIHAGHRLYGIAINPN |
| | | RVFKVNTNAYYEMSGLEVSFEELRTFGGHD |
| | | AKFIDSLQENEFRLYYYNKFKDIASTLNKA |
| | | KSIVGTTASLQYMKNVFKEKYLLSEDTSGK |
| | | FSVDKLKFDKLYKMLTEIYTEDNFVKFFKV |
| | | LNRKTYLNFDKAVFKINIVPKVNYTIYDGF |
| | | NLRNTNLAANFNGQNTEINNMNFTKLKNFT |
| | | GLFEFYKLLCVRGIITSKTKSLDKGYNKAL |
| | | NDLCIKVNNWDLFFSPSEDNFTNDLNKGEE |
| | | ITSDTNIEAAEENISLDLIQQYYLTFNFDN |
| | | EPENISIENLSSDIIGQLELMPNIERFPNG |
| | | KKYELDKYTMFHYLRAQEFEHGKSRIALTN |
| | | SVNEALLNPSRVYTFFSSDYVKKVNKATEA |
| | | AMFLGWVEQLVYDFTDETSEVSTTDKIADI |
| | | TIIIPYIGPALNIGNMLYKDDFVGALIFSG |
| | | AVILLEFIPEIAIPVLGTFALVSYIANKVL |
| | | TVQTIDNALSKRNEKWDEVYKYIVTNWLAK |
| | | VNTQIDLIRKKMKEALENQAEATKAIINYQ |
| | | YNQYTEEEKNNINFNIDDLSSKLNESINKA |
| | | MININKFLNQCSVSYLMNSMIPYGVKRLED |
| | | FDASLKDALLKYIYDNRGTLIGQVDRLKDK |
| | | VNNTLSTDIPFQLSKYVDNQRLLSTFTEYI |
| | | KNIINTSILNLRYESNHLIDLSRYASKINI |
| | | GSKVNFDPIDKNQIQLFNLESSKIEVILKN |
| | | AIVYNSMYENFSTSFWIRIPKYFNSISLNN |
| | | EYTIINCMENNSGWKVSLNYGEIIWTLQDT |
| | | QEIKQRVVFKYSQMINISDYINRWIFVTIT |
| | | NNRLNNSKIYINGRLIDQKPISNLGNIHAS |
| | | NNIMFKLDGCRDTHRYIWIKYFNLFDKELN |
| | | EKEIKDLYDNQSNSGILKDFWGDYLQYDKP |
| | | YYMLNLYDPNKYVDVNNVGIRGYMYLKGPR |
| | | GSVMTTNIYLNSSLYRGTKFIIKKYASGNK |
| | | DNIVRNNDRVYINVVVKNKEYRLATNASQA |
| | | GVEKILSALEIPDVGNLSQVVVMKSKNDQG |
| | | ITNKCKMNLQDNNGNDIGFIGFHQFNNIAK |
| | | LVASNWYNRQIERSSRTWGCSWEFIPVDDG |
| | | WGERPL |
| 30 | BoNT/ | MPFVNKQFNYKDPVNGVDIAYIKIPNAGQM |
| | A1-D1288E | QPVKAFKIHNKIWVIPERDTFTNPEEGDLN |
| | | PPPEAKQVPVSYYDSTYLSTDNEKDNYLKG |
| | | VTKLFERIYSTDLGRMLLTSIVRGIPFWGG |
| | | STIDTELKVIDTNCINVIQPDGSYRSEELN |
| | | LVIIGPSADIIQFECKSFGHEVLNLTRNGY |
| | | GSTQYIRFSPDFTFGFEESLEVDTNPLLGA |
| | | GKFATDPAVTLAHELIHAGHRLYGIAINPN |
| | | RVFKVNTNAYYEMSGLEVSFEELRTFGGHD |
| | | AKFIDSLQENEFRLYYYNKFKDIASTLNKA |
| | | KSIVGTTASLQYMKNVFKEKYLLSEDTSGK |
| | | FSVDKLKFDKLYKMLTEIYTEDNFVKFFKV |
| | | LNRKTYLNFDKAVFKINIVPKVNYTIYDGF |
| | | NLRNTNLAANFNGQNTEINNMNFTKLKNFT |
| | | GLFEFYKLLCVRGIITSKTKSLDKGYNKAL |
| | | NDLCIKVNNWDLFFSPSEDNFTNDLNKGEE |
| | | ITSDTNIEAAEENISLDLIQQYYLTFNFDN |
| | | EPENISIENLSSDIIGQLELMPNIERFPNG |
| | | KKYELDKYTMFHYLRAQEFEHGKSRIALTN |
| | | SVNEALLNPSRVYTFFSSDYVKKVNKATEA |
| | | AMFLGWVEQLVYDFTDETSEVSTTDKIADI |
| | | TIIIPYIGPALNIGNMLYKDDFVGALIFSG |
| | | AVILLEFIPEIAIPVLGTFALVSYIANKVL |
| | | TVQTIDNALSKRNEKWDEVYKYIVTNWLAK |
| | | VNTQIDLIRKKMKEALENQAEATKAIINYQ |
| | | YNQYTEEEKNNINFNIDDLSSKLNESINKA |
| | | MININKFLNQCSVSYLMNSMIPYGVKRLED |
| | | FDASLKDALLKYIYDNRGTLIGQVDRLKDK |
| | | VNNTLSTDIPFQLSKYVDNQRLLSTFTEYI |
| | | KNIINTSILNLRYESNHLIDLSRYASKINI |
| | | GSKVNFDPIDKNQIQLFNLESSKIEVILKN |
| | | AIVYNSMYENFSTSFWIRIPKYFNSISLNN |
| | | EYTIINCMENNSGWKVSLNYGEIIWTLQDT |
| | | QEIKQRVVFKYSQMINISDYINRWIFVTIT |
| | | NNRLNNSKIYINGRLIDQKPISNLGNIHAS |
| | | NNIMFKLDGCRDTHRYIWIKYFNLFDKELN |
| | | EKEIKDLYDNQSNSGILKDFWGDYLQYDKP |
| | | YYMLNLYDPNKYVDVNNVGIRGYMYLKGPR |
| | | GSVMTTNIYLNSSLYRGTKFIIKKYASGNK |
| | | DNIVRNNDRVYINVVVKNKEYRLATNASQA |
| | | GVEKILSALEIPDVGNLSQVVVMKSKNDQG |
| | | ITNKCKMNLQDNNGNDIGFIGFHQFNNIAK |
| | | LVASNWYNRQIERSSRTLGCSWEFIPVEDG |
| | | WGERPL |
| 31 | BoNT/ | MPFVNKQFNYKDPVNGVDIAYIKIPNAGQM |
| | A1-D1289Y | QPVKAFKIHNKIWVIPERDTFTNPEEGDLN |
| | | PPPEAKQVPVSYYDSTYLSTDNEKDNYLKG |
| | | VTKLFERIYSTDLGRMLLTSIVRGIPFWGG |
| | | STIDTELKVIDTNCINVIQPDGSYRSEELN |
| | | LVIIGPSADIIQFECKSFGHEVLNLTRNGY |
| | | GSTQYIRFSPDFTFGFEESLEVDTNPLLGA |
| | | GKFATDPAVTLAHELIHAGHRLYGIAINPN |
| | | RVFKVNTNAYYEMSGLEVSFEELRTFGGHD |
| | | AKFIDSLQENEFRLYYYNKFKDIASTLNKA |
| | | KSIVGTTASLQYMKNVFKEKYLLSEDTSGK |
| | | FSVDKLKFDKLYKMLTEIYTEDNFVKFFKV |
| | | LNRKTYLNFDKAVFKINIVPKVNYTIYDGF |
| | | NLRNTNLAANFNGQNTEINNMNFTKLKNFT |
| | | GLFEFYKLLCVRGIITSKTKSLDKGYNKAL |
| | | NDLCIKVNNWDLFFSPSEDNFTNDLNKGEE |
| | | ITSDTNIEAAEENISLDLIQQYYLTFNFDN |
| | | EPENISIENLSSDIIGQLELMPNIERFPNG |
| | | KKYELDKYTMFHYLRAQEFEHGKSRIALTN |
| | | SVNEALLNPSRVYTFFSSDYVKKVNKATEA |
| | | AMFLGWVEQLVYDFTDETSEVSTTDKIADI |
| | | TIIIPYIGPALNIGNMLYKDDFVGALIFSG |
| | | AVILLEFIPEIAIPVLGTFALVSYIANKVL |
| | | TVQTIDNALSKRNEKWDEVYKYIVTNWLAK |
| | | VNTQIDLIRKKMKEALENQAEATKAIINYQ |
| | | YNQYTEEEKNNINFNIDDLSSKLNESINKA |
| | | MININKFLNQCSVSYLMNSMIPYGVKRLED |
| | | FDASLKDALLKYIYDNRGTLIGQVDRLKDK |
| | | VNNTLSTDIPFQLSKYVDNQRLLSTFTEYI |
| | | KNIINTSILNLRYESNHLIDLSRYASKINI |
| | | GSKVNFDPIDKNQIQLFNLESSKIEVILKN |
| | | AIVYNSMYENFSTSFWIRIPKYFNSISLNN |
| | | EYTIINCMENNSGWKVSLNYGEIIWTLQDT |
| | | QEIKQRVVFKYSQMINISDYINRWIFVTIT |
| | | NNRLNNSKIYINGRLIDQKPISNLGNIHAS |
| | | NNIMFKLDGCRDTHRYIWIKYFNLFDKELN |
| | | EKEIKDLYDNQSNSGILKDFWGDYLQYDKP |
| | | YYMLNLYDPNKYVDVNNVGIRGYMYLKGPR |
| | | GSVMTTNIYLNSSLYRGTKFIIKKYASGNK |
| | | DNIVRNNDRVYINVVVKNKEYRLATNASQA |
| | | GVEKILSALEIPDVGNLSQVVVMKSKNDQG |
| | | ITNKCKMNLQDNNGNDIGFIGFHQFNNIAK |
| | | LVASNWYNRQIERSSRTLGCSWEFIPVDYG |
| | | WGERPL |
| 32 | BoNT/ | MPFVNKQFNYKDPVNGVDIAYIKIPNAGQM |
| | A1-G1292R | QPVKAFKIHNKIWVIPERDTFTNPEEGDLN |
| | | PPPEAKQVPVSYYDSTYLSTDNEKDNYLKG |
| | | VTKLFERIYSTDLGRMLLTSIVRGIPFWGG |
| | | STIDTELKVIDTNCINVIQPDGSYRSEELN |
| | | LVIIGPSADIIQFECKSFGHEVLNLTRNGY |
| | | GSTQYIRFSPDFTFGFEESLEVDTNPLLGA |
| | | GKFATDPAVTLAHELIHAGHRLYGIAINPN |
| | | RVFKVNTNAYYEMSGLEVSFEELRTFGGHD |
| | | AKFIDSLQENEFRLYYYNKFKDIASTLNKA |
| | | KSIVGTTASLQYMKNVFKEKYLLSEDTSGK |
| | | FSVDKLKFDKLYKMLTEIYTEDNFVKFFKV |
| | | LNRKTYLNFDKAVFKINIVPKVNYTIYDGF |
| | | NLRNTNLAANFNGQNTEINNMNFTKLKNFT |
| | | GLFEFYKLLCVRGIITSKTKSLDKGYNKAL |
| | | NDLCIKVNNWDLFFSPSEDNFTNDLNKGEE |
| | | ITSDTNIEAAEENISLDLIQQYYLTFNFDN |
| | | EPENISIENLSSDIIGQLELMPNIERFPNG |
| | | KKYELDKYTMFHYLRAQEFEHGKSRIALTN |
| | | SVNEALLNPSRVYTFFSSDYVKKVNKATEA |
| | | AMFLGWVEQLVYDFTDETSEVSTTDKIADI |
| | | TIIIPYIGPALNIGNMLYKDDFVGALIFSG |
| | | AVILLEFIPEIAIPVLGTFALVSYIANKVL |
| | | TVQTIDNALSKRNEKWDEVYKYIVTNWLAK |
| | | VNTQIDLIRKKMKEALENQAEATKAIINYQ |
| | | YNQYTEEEKNNINFNIDDLSSKLNESINKA |
| | | MININKFLNQCSVSYLMNSMIPYGVKRLED |
| | | FDASLKDALLKYIYDNRGTLIGQVDRLKDK |
| | | VNNTLSTDIPFQLSKYVDNQRLLSTFTEYI |
| | | KNIINTSILNLRYESNHLIDLSRYASKINI |
| | | GSKVNFDPIDKNQIQLFNLESSKIEVILKN |
| | | AIVYNSMYENFSTSFWIRIPKYFNSISLNN |
| | | EYTIINCMENNSGWKVSLNYGEIIWTLQDT |
| | | QEIKQRVVFKYSQMINISDYINRWIFVTIT |
| | | NNRLNNSKIYINGRLIDQKPISNLGNIHAS |
| | | NNIMFKLDGCRDTHRYIWIKYFNLFDKELN |
| | | EKEIKDLYDNQSNSGILKDFWGDYLQYDKP |
| | | YYMLNLYDPNKYVDVNNVGIRGYMYLKGPR |
| | | GSVMTTNIYLNSSLYRGTKFIIKKYASGNK |
| | | DNIVRNNDRVYINVVVKNKEYRLATNASQA |
| | | GVEKILSALEIPDVGNLSQVVVMKSKNDQG |
| | | ITNKCKMNLQDNNGNDIGFIGFHQFNNIAK |
| | | LVASNWYNRQIERSSRTLGCSWEFIPVDDG |
| | | WRERPL |
| 33 | BoNT/ | |
| | A1-G1292K | MPFVNKQFNYKDPVNGVDIAYIKIPNAGQM |
| | | QPVKAFKIHNKIWVIPERDTFTNPEEGDLN |
| | | PPPEAKQVPVSYYDSTYLSTDNEKDNYLKG |
| | | VTKLFERIYSTDLGRMLLTSIVRGIPFWGG |
| | | STIDTELKVIDTNCINVIQPDGSYRSEELN |
| | | LVIIGPSADIIQFECKSFGHEVLNLTRNGY |
| | | GSTQYIRFSPDFTFGFEESLEVDTNPLLGA |
| | | GKFATDPAVTLAHELIHAGHRLYGIAINPN |
| | | RVFKVNTNAYYEMSGLEVSFEELRTFGGHD |
| | | AKFIDSLQENEFRLYYYNKFKDIASTLNKA |
| | | KSIVGTTASLQYMKNVFKEKYLLSEDTSGK |
| | | FSVDKLKFDKLYKMLTEIYTEDNFVKFFKV |
| | | LNRKTYLNFDKAVFKINIVPKVNYTIYDGF |
| | | NLRNTNLAANFNGQNTEINNMNFTKLKNFT |
| | | GLFEFYKLLCVRGIITSKTKSLDKGYNKAL |
| | | NDLCIKVNNWDLFFSPSEDNFTNDLNKGEE |
| | | ITSDTNIEAAEENISLDLIQQYYLTFNFDN |
| | | EPENISIENLSSDIIGQLELMPNIERFPNG |
| | | KKYELDKYTMFHYLRAQEFEHGKSRIALTN |
| | | SVNEALLNPSRVYTFFSSDYVKKVNKATEA |
| | | AMFLGWVEQLVYDFTDETSEVSTTDKIADI |
| | | TIIIPYIGPALNIGNMLYKDDFVGALIFSG |
| | | AVILLEFIPEIAIPVLGTFALVSYIANKVL |
| | | TVQTIDNALSKRNEKWDEVYKYIVTNWLAK |
| | | VNTQIDLIRKKMKEALENQAEATKAIINYQ |
| | | YNQYTEEEKNNINFNIDDLSSKLNESINKA |
| | | MININKFLNQCSVSYLMNSMIPYGVKRLED |
| | | FDASLKDALLKYIYDNRGTLIGQVDRLKDK |
| | | VNNTLSTDIPFQLSKYVDNQRLLSTFTEYI |
| | | KNIINTSILNLRYESNHLIDLSRYASKINI |
| | | GSKVNFDPIDKNQIQLFNLESSKIEVILKN |
| | | AIVYNSMYENFSTSFWIRIPKYFNSISLNN |
| | | EYTIINCMENNSGWKVSLNYGEIIWTLQDT |
| | | QEIKQRVVFKYSQMINISDYINRWIFVTIT |
| | | NNRLNNSKIYINGRLIDQKPISNLGNIHAS |
| | | NNIMFKLDGCRDTHRYIWIKYFNLFDKELN |
| | | EKEIKDLYDNQSNSGILKDFWGDYLQYDKP |
| | | YYMLNLYDPNKYVDVNNVGIRGYMYLKGPR |
| | | GSVMTTNIYLNSSLYRGTKFIIKKYASGNK |
| | | DNIVRNNDRVYINVVVKNKEYRLATNASQA |
| | | GVEKILSALEIPDVGNLSQVVVMKSKNDQG |
| | | ITNKCKMNLQDNNGNDIGFIGFHQFNNIAK |
| | | LVASNWYNRQIERSSRTLGCSWEFIPVDDG |
| | | WKERPL |
| 34 | BoNT/ | MPFVNKQFNYKDPVNGVDIAYIKIPNAGQM |
| | A1-R1294S | QPVKAFKIHNKIWVIPERDTFTNPEEGDLN |
| | | PPPEAKQVPVSYYDSTYLSTDNEKDNYLKG |
| | | VTKLFERIYSTDLGRMLLTSIVRGIPFWGG |
| | | STIDTELKVIDTNCINVIQPDGSYRSEELN |
| | | LVIIGPSADIIQFECKSFGHEVLNLTRNGY |
| | | GSTQYIRFSPDFTFGFEESLEVDTNPLLGA |
| | | GKFATDPAVTLAHELIHAGHRLYGIAINPN |
| | | RVFKVNTNAYYEMSGLEVSFEELRTFGGHD |
| | | AKFIDSLQENEFRLYYYNKFKDIASTLNKA |
| | | KSIVGTTASLQYMKNVFKEKYLLSEDTSGK |
| | | FSVDKLKFDKLYKMLTEIYTEDNFVKFFKV |
| | | LNRKTYLNFDKAVFKINIVPKVNYTIYDGF |
| | | NLRNTNLAANFNGQNTEINNMNFTKLKNFT |
| | | GLFEFYKLLCVRGIITSKTKSLDKGYNKAL |
| | | NDLCIKVNNWDLFFSPSEDNFTNDLNKGEE |
| | | ITSDTNIEAAEENISLDLIQQYYLTFNFDN |
| | | EPENISIENLSSDIIGQLELMPNIERFPNG |
| | | KKYELDKYTMFHYLRAQEFEHGKSRIALTN |
| | | SVNEALLNPSRVYTFFSSDYVKKVNKATEA |
| | | AMFLGWVEQLVYDFTDETSEVSTTDKIADI |
| | | TIIIPYIGPALNIGNMLYKDDFVGALIFSG |
| | | AVILLEFIPEIAIPVLGTFALVSYIANKVL |
| | | TVQTIDNALSKRNEKWDEVYKYIVTNWLAK |
| | | VNTQIDLIRKKMKEALENQAEATKAIINYQ |
| | | YNQYTEEEKNNINFNIDDLSSKLNESINKA |
| | | MININKFLNQCSVSYLMNSMIPYGVKRLED |
| | | FDASLKDALLKYIYDNRGTLIGQVDRLKDK |
| | | VNNTLSTDIPFQLSKYVDNQRLLSTFTEYI |
| | | KNIINTSILNLRYESNHLIDLSRYASKINI |
| | | GSKVNFDPIDKNQIQLFNLESSKIEVILKN |
| | | AIVYNSMYENFSTSFWIRIPKYFNSISLNN |
| | | EYTIINCMENNSGWKVSLNYGEIIWTLQDT |
| | | QEIKQRVVFKYSQMINISDYINRWIFVTIT |
| | | NNRLNNSKIYINGRLIDQKPISNLGNIHAS |
| | | NNIMFKLDGCRDTHRYIWIKYFNLFDKELN |
| | | EKEIKDLYDNQSNSGILKDFWGDYLQYDKP |
| | | YYMLNLYDPNKYVDVNNVGIRGYMYLKGPR |
| | | GSVMTTNIYLNSSLYRGTKFIIKKYASGNK |
| | | DNIVRNNDRVYINVVVKNKEYRLATNASQA |
| | | GVEKILSALEIPDVGNLSQVVVMKSKNDQG |
| | | ITNKCKMNLQDNNGNDIGFIGFHQFNNIAK |
| | | LVASNWYNRQIERSSRTLGCSWEFIPVDDG |
| | | WGESPL |
| 35 | BoNT/ | MPFVNKQFNYKDPVNGVDIAYIKIPNAGQM |
| | A1-R1294T | QPVKAFKIHNKIWVIPERDTFTNPEEGDLN |
| | | PPPEAKQVPVSYYDSTYLSTDNEKDNYLKG |
| | | VTKLFERIYSTDLGRMLLTSIVRGIPFWGG |
| | | STIDTELKVIDTNCINVIQPDGSYRSEELN |
| | | LVIIGPSADIIQFECKSFGHEVLNLTRNGY |
| | | GSTQYIRFSPDFTFGFEESLEVDTNPLLGA |
| | | GKFATDPAVTLAHELIHAGHRLYGIAINPN |
| | | RVFKVNTNAYYEMSGLEVSFEELRTFGGHD |
| | | AKFIDSLQENEFRLYYYNKFKDIASTLNKA |
| | | KSIVGTTASLQYMKNVFKEKYLLSEDTSGK |
| | | FSVDKLKFDKLYKMLTEIYTEDNFVKFFKV |
| | | LNRKTYLNFDKAVFKINIVPKVNYTIYDGF |
| | | NLRNTNLAANFNGQNTEINNMNFTKLKNFT |
| | | GLFEFYKLLCVRGIITSKTKSLDKGYNKAL |
| | | NDLCIKVNNWDLFFSPSEDNFTNDLNKGEE |
| | | ITSDTNIEAAEENISLDLIQQYYLTFNFDN |
| | | EPENISIENLSSDIIGQLELMPNIERFPNG |
| | | KKYELDKYTMFHYLRAQEFEHGKSRIALTN |
| | | SVNEALLNPSRVYTFFSSDYVKKVNKATEA |
| | | AMFLGWVEQLVYDFTDETSEVSTTDKIADI |
| | | TIIIPYIGPALNIGNMLYKDDFVGALIFSG |
| | | AVILLEFIPEIAIPVLGTFALVSYIANKVL |
| | | TVQTIDNALSKRNEKWDEVYKYIVTNWLAK |
| | | VNTQIDLIRKKMKEALENQAEATKAIINYQ |
| | | YNQYTEEEKNNINFNIDDLSSKLNESINKA |
| | | MININKFLNQCSVSYLMNSMIPYGVKRLED |
| | | FDASLKDALLKYIYDNRGTLIGQVDRLKDK |
| | | VNNTLSTDIPFQLSKYVDNQRLLSTFTEYI |
| | | KNIINTSILNLRYESNHLIDLSRYASKINI |
| | | GSKVNFDPIDKNQIQLFNLESSKIEVILKN |
| | | AIVYNSMYENFSTSFWIRIPKYFNSISLNN |
| | | EYTIINCMENNSGWKVSLNYGEIIWTLQDT |
| | | QEIKQRVVFKYSQMINISDYINRWIFVTIT |
| | | NNRLNNSKIYINGRLIDQKPISNLGNIHAS |
| | | NNIMFKLDGCRDTHRYIWIKYFNLFDKELN |
| | | EKEIKDLYDNQSNSGILKDFWGDYLQYDKP |
| | | YYMLNLYDPNKYVDVNNVGIRGYMYLKGPR |
| | | GSVMTTNIYLNSSLYRGTKFIIKKYASGNK |
| | | DNIVRNNDRVYINVVVKNKEYRLATNASQA |
| | | GVEKILSALEIPDVGNLSQVVVMKSKNDQG |
| | | ITNKCKMNLQDNNGNDIGFIGFHQFNNIAK |
| | | LVASNWYNRQIERSSRTLGCSWEFIPVDDG |
| | | WGETPL |
| 36 | BoNT/ | MPFVNKQFNYKDPVNGVDIAYIKIPNAGQM |
| | A1-P1295S | QPVKAFKIHNKIWVIPERDTFTNPEEGDLN |
| | | PPPEAKQVPVSYYDSTYLSTDNEKDNYLKG |
| | | VTKLFERIYSTDLGRMLLTSIVRGIPFWGG |
| | | STIDTELKVIDTNCINVIQPDGSYRSEELN |
| | | LVIIGPSADIIQFECKSFGHEVLNLTRNGY |
| | | GSTQYIRFSPDFTFGFEESLEVDTNPLLGA |
| | | GKFATDPAVTLAHELIHAGHRLYGIAINPN |
| | | RVFKVNTNAYYEMSGLEVSFEELRTFGGHD |
| | | AKFIDSLQENEFRLYYYNKFKDIASTLNKA |
| | | KSIVGTTASLQYMKNVFKEKYLLSEDTSGK |
| | | FSVDKLKFDKLYKMLTEIYTEDNFVKFFKV |
| | | LNRKTYLNFDKAVFKINIVPKVNYTIYDGF |
| | | NLRNTNLAANFNGQNTEINNMNFTKLKNFT |
| | | GLFEFYKLLCVRGIITSKTKSLDKGYNKAL |
| | | NDLCIKVNNWDLFFSPSEDNFTNDLNKGEE |
| | | ITSDTNIEAAEENISLDLIQQYYLTFNFDN |
| | | EPENISIENLSSDIIGQLELMPNIERFPNG |
| | | KKYELDKYTMFHYLRAQEFEHGKSRIALTN |
| | | SVNEALLNPSRVYTFFSSDYVKKVNKATEA |
| | | AMFLGWVEQLVYDFTDETSEVSTTDKIADI |
| | | TIIIPYIGPALNIGNMLYKDDFVGALIFSG |
| | | AVILLEFIPEIAIPVLGTFALVSYIANKVL |
| | | TVQTIDNALSKRNEKWDEVYKYIVTNWLAK |
| | | VNTQIDLIRKKMKEALENQAEATKAIINYQ |
| | | YNQYTEEEKNNINFNIDDLSSKLNESINKA |
| | | MININKFLNQCSVSYLMNSMIPYGVKRLED |
| | | FDASLKDALLKYIYDNRGTLIGQVDRLKDK |
| | | VNNTLSTDIPFQLSKYVDNQRLLSTFTEYI |
| | | KNIINTSILNLRYESNHLIDLSRYASKINI |
| | | GSKVNFDPIDKNQIQLFNLESSKIEVILKN |
| | | AIVYNSMYENFSTSFWIRIPKYFNSISLNN |
| | | EYTIINCMENNSGWKVSLNYGEIIWTLQDT |
| | | QEIKQRVVFKYSQMINISDYINRWIFVTIT |
| | | NNRLNNSKIYINGRLIDQKPISNLGNIHAS |
| | | NNIMFKLDGCRDTHRYIWIKYFNLFDKELN |
| | | EKEIKDLYDNQSNSGILKDFWGDYLQYDKP |
| | | YYMLNLYDPNKYVDVNNVGIRGYMYLKGPR |
| | | GSVMTTNIYLNSSLYRGTKFIIKKYASGNK |
| | | DNIVRNNDRVYINVVVKNKEYRLATNASQA |
| | | GVEKILSALEIPDVGNLSQVVVMKSKNDQG |
| | | ITNKCKMNLQDNNGNDIGFIGFHQFNNIAK |
| | | LVASNWYNRQIERSSRTLGCSWEFIPVDDG |
| | | WGERSL |
| 37 | BoNT/ | MPFVNKQFNYKDPVNGVDIAYIKIPNAGQM |
| | A1-P1295T | QPVKAFKIHNKIWVIPERDTFTNPEEGDLN |
| | | PPPEAKQVPVSYYDSTYLSTDNEKDNYLKG |
| | | VTKLFERIYSTDLGRMLLTSIVRGIPFWGG |
| | | STIDTELKVIDTNCINVIQPDGSYRSEELN |
| | | LVIIGPSADIIQFECKSFGHEVLNLTRNGY |
| | | GSTQYIRFSPDFTFGFEESLEVDTNPLLGA |
| | | GKFATDPAVTLAHELIHAGHRLYGIAINPN |
| | | RVFKVNTNAYYEMSGLEVSFEELRTFGGHD |
| | | AKFIDSLQENEFRLYYYNKFKDIASTLNKA |
| | | KSIVGTTASLQYMKNVFKEKYLLSEDTSGK |
| | | FSVDKLKFDKLYKMLTEIYTEDNFVKFFKV |
| | | LNRKTYLNFDKAVFKINIVPKVNYTIYDGF |
| | | NLRNTNLAANFNGQNTEINNMNFTKLKNFT |
| | | GLFEFYKLLCVRGIITSKTKSLDKGYNKAL |
| | | NDLCIKVNNWDLFFSPSEDNFTNDLNKGEE |
| | | ITSDTNIEAAEENISLDLIQQYYLTFNFDN |
| | | EPENISIENLSSDIIGQLELMPNIERFPNG |
| | | KKYELDKYTMFHYLRAQEFEHGKSRIALTN |
| | | SVNEALLNPSRVYTFFSSDYVKKVNKATEA |
| | | AMFLGWVEQLVYDFTDETSEVSTTDKIADI |
| | | TIIIPYIGPALNIGNMLYKDDFVGALIFSG |
| | | AVILLEFIPEIAIPVLGTFALVSYIANKVL |
| | | TVQTIDNALSKRNEKWDEVYKYIVTNWLAK |
| | | VNTQIDLIRKKMKEALENQAEATKAIINYQ |
| | | YNQYTEEEKNNINFNIDDLSSKLNESINKA |
| | | MININKFLNQCSVSYLMNSMIPYGVKRLED |
| | | FDASLKDALLKYIYDNRGTLIGQVDRLKDK |
| | | VNNTLSTDIPFQLSKYVDNQRLLSTFTEYI |
| | | KNIINTSILNLRYESNHLIDLSRYASKINI |
| | | GSKVNFDPIDKNQIQLFNLESSKIEVILKN |
| | | AIVYNSMYENFSTSFWIRIPKYFNSISLNN |
| | | EYTIINCMENNSGWKVSLNYGEIIWTLQDT |
| | | QEIKQRVVFKYSQMINISDYINRWIFVTIT |
| | | NNRLNNSKIYINGRLIDQKPISNLGNIHAS |
| | | NNIMFKLDGCRDTHRYIWIKYFNLFDKELN |
| | | EKEIKDLYDNQSNSGILKDFWGDYLQYDKP |
| | | YYMLNLYDPNKYVDVNNVGIRGYMYLKGPR |
| | | GSVMTTNIYLNSSLYRGTKFIIKKYASGNK |
| | | DNIVRNNDRVYINVVVKNKEYRLATNASQA |
| | | GVEKILSALEIPDVGNLSQVVVMKSKNDQG |
| | | ITNKCKMNLQDNNGNDIGFIGFHQFNNIAK |
| | | LVASNWYNRQIERSSRTLGCSWEFIPVDDG |
| | | WGERTL |
| 38 | BoNT/ | MPFVNKQFNYKDPVNGVDIAYIKIPNAGQM |
| | A2-K915Q | QPVKAFKIHNKIWVIPERDTFTNPEEGDLN |
| | | PPPEAKQVPVSYYDSTYLSTDNEKDNYLKG |
| | | VTKLFERIYSTDLGRMLLTSIVRGIPFWGG |
| | | STIDTELKVIDTNCINVIQPDGSYRSEELN |
| | | LVIIGPSADIIQFECKSFGHDVLNLTRNGY |
| | | GSTQYIRFSPDFTFGFEESLEVDTNPLLGA |
| | | GKFATDPAVTLAHELIHAEHRLYGIAINPN |
| | | RVFKVNTNAYYEMSGLEVSFEELRTFGGHD |
| | | AKFIDSLQENEFRLYYYNKFKDVASTLNKA |
| | | KSIIGTTASLQYMKNVFKEKYLLSEDTSGK |
| | | FSVDKLKFDKLYKMLTEIYTEDNFVNFFKV |
| | | INRKTYLNFDKAVFRINIVPDENYTIKDGF |
| | | NLKGANLSTNFNGQNTEINSRNFTRLKNFT |
| | | GLFEFYKLLCVRGIIPFKTKSLDEGYNKAL |
| | | NDLCIKVNNWDLFFSPSEDNFTNDLDKVEE |
| | | ITADTNIEAAEENISLDLIQQYYLTFDFDN |
| | | EPENISIENLSSDIIGQLEPMPNIERFPNG |
| | | KKYELDKYTMFHYLRAQEFEHGDSRIILTN |
| | | SAEEALLKPNVAYTFFSSKYVKKINKAVEA |
| | | FMFLNWAEELVYDFTDETNEVTTMDKIADI |
| | | TIIVPYIGPALNIGNMLSKGEFVEAIIFTG |
| | | VVAMLEFIPEYALPVFGTFAIVSYIANKVL |
| | | TVQTINNALSKRNEKWDEVYKYTVTNWLAK |
| | | VNTQIDLIREKMKKALENQAEATKAIINYQ |
| | | YNQYTEEEKNNINFNIDDLSSKLNESINSA |
| | | MININKFLDQCSVSYLMNSMIPYAVKRLKD |
| | | FDASVRDVLLKYIYDNRGTLVLQVDRLKDE |
| | | VNNTLSADIPFQLSKYVDNKKLLSTFTEYI |
| | | KNIVNTSILSIVYKKDDLIDLSRYGAKINI |
| | | GDRVYYDSIDKNQIQLINLESSTIEVILKN |
| | | AIVYNSMYENFSTSFWIKIPKYFSKINLNN |
| | | EYTIINCIENNSGWKVSLNYGEIIWTLQDN |
| | | KQNIQRVVFKYSQMVNISDYINRWIFVTIT |
| | | NNRLTKSKIYINGRLIDQKPISNLGNIHAS |
| | | NKIMFKLDGCRDPRRYIMIKYFNLFDKELN |
| | | EKEIKDLYDSQSNSGILKDFWGNYLQYDKP |
| | | YYMLNLFDPNKYVDVNNIGIRGYMYLKGPR |
| | | GSVVTTNIYLNSTLYEGTKFIIKKYASGNE |
| | | DNIVRNNDRVYINVVVKNKEYRLATNASQA |
| | | GVEKILSALEIPDVGNLSQVVVMKSKDDQG |
| | | IRNKCKMNLQDNNGNDIGFIGFHLYDNIAK |
| | | LVASNWYNRQVGKASRTFGCSWEFIPVDDG |
| | | WGESSL |
| 39 | BoNT/ | MPFVNKQFNYKDPVNGVDIAYIKIPNAGQM |
| | A2-T923K | QPVKAFKIHNKIWVIPERDTFTNPEEGDLN |
| | | PPPEAKQVPVSYYDSTYLSTDNEKDNYLKG |
| | | VTKLFERIYSTDLGRMLLTSIVRGIPFWGG |
| | | STIDTELKVIDTNCINVIQPDGSYRSEELN |
| | | LVIIGPSADIIQFECKSFGHDVLNLTRNGY |
| | | GSTQYIRFSPDFTFGFEESLEVDTNPLLGA |
| | | GKFATDPAVTLAHELIHAEHRLYGIAINPN |
| | | RVFKVNTNAYYEMSGLEVSFEELRTFGGHD |
| | | AKFIDSLQENEFRLYYYNKFKDVASTLNKA |
| | | KSIIGTTASLQYMKNVFKEKYLLSEDTSGK |
| | | FSVDKLKFDKLYKMLTEIYTEDNFVNFFKV |
| | | INRKTYLNFDKAVFRINIVPDENYTIKDGF |
| | | NLKGANLSTNFNGQNTEINSRNFTRLKNFT |
| | | GLFEFYKLLCVRGIIPFKTKSLDEGYNKAL |
| | | NDLCIKVNNWDLFFSPSEDNFTNDLDKVEE |
| | | ITADTNIEAAEENISLDLIQQYYLTFDFDN |
| | | EPENISIENLSSDIIGQLEPMPNIERFPNG |
| | | KKYELDKYTMFHYLRAQEFEHGDSRIILTN |
| | | SAEEALLKPNVAYTFFSSKYVKKINKAVEA |
| | | FMFLNWAEELVYDFTDETNEVTTMDKIADI |
| | | TIIVPYIGPALNIGNMLSKGEFVEAIIFTG |
| | | VVAMLEFIPEYALPVFGTFAIVSYIANKVL |
| | | TVQTINNALSKRNEKWDEVYKYTVTNWLAK |
| | | VNTQIDLIREKMKKALENQAEATKAIINYQ |
| | | YNQYTEEEKNNINFNIDDLSSKLNESINSA |
| | | MININKFLDQCSVSYLMNSMIPYAVKRLKD |
| | | FDASVRDVLLKYIYDNRGTLVLQVDRLKDE |
| | | VNNTLSADIPFQLSKYVDNKKLLSTFTEYI |
| | | KNIVNTSILSIVYKKDDLIDLSRYGAKINI |
| | | GDRVYYDSIDKNQIKLINLESSKIEVILKN |
| | | AIVYNSMYENFSTSFWIKIPKYFSKINLNN |
| | | EYTIINCIENNSGWKVSLNYGEIIWTLQDN |
| | | KQNIQRVVFKYSQMVNISDYINRWIFVTIT |
| | | NNRLTKSKIYINGRLIDQKPISNLGNIHAS |
| | | NKIMFKLDGCRDPRRYIMIKYFNLFDKELN |
| | | EKEIKDLYDSQSNSGILKDFWGNYLQYDKP |
| | | YYMLNLFDPNKYVDVNNIGIRGYMYLKGPR |
| | | GSVVTTNIYLNSTLYEGTKFIIKKYASGNE |
| | | DNIVRNNDRVYINVVVKNKEYRLATNASQA |
| | | GVEKILSALEIPDVGNLSQVVVMKSKDDQG |
| | | IRNKCKMNLQDNNGNDIGFIGFHLYDNIAK |
| | | LVASNWYNRQVGKASRTFGCSWEFIPVDDG |
| | | WGESSL |
| 40 | BoNT/ | MPFVNKQFNYKDPVNGVDIAYIKIPNAGQM |
| | A2-S1090N | QPVKAFKIHNKIWVIPERDTFTNPEEGDLN |
| | | PPPEAKQVPVSYYDSTYLSTDNEKDNYLKG |
| | | VTKLFERIYSTDLGRMLLTSIVRGIPFWGG |
| | | STIDTELKVIDTNCINVIQPDGSYRSEELN |
| | | LVIIGPSADIIQFECKSFGHDVLNLTRNGY |
| | | GSTQYIRFSPDFTFGFEESLEVDTNPLLGA |
| | | GKFATDPAVTLAHELIHAEHRLYGIAINPN |
| | | RVFKVNTNAYYEMSGLEVSFEELRTFGGHD |
| | | AKFIDSLQENEFRLYYYNKFKDVASTLNKA |
| | | KSIIGTTASLQYMKNVFKEKYLLSEDTSGK |
| | | FSVDKLKFDKLYKMLTEIYTEDNFVNFFKV |
| | | INRKTYLNFDKAVFRINIVPDENYTIKDGF |
| | | NLKGANLSTNFNGQNTEINSRNFTRLKNFT |
| | | GLFEFYKLLCVRGIIPFKTKSLDEGYNKAL |
| | | NDLCIKVNNWDLFFSPSEDNFTNDLDKVEE |
| | | ITADTNIEAAEENISLDLIQQYYLTFDFDN |
| | | EPENISIENLSSDIIGQLEPMPNIERFPNG |
| | | KKYELDKYTMFHYLRAQEFEHGDSRIILTN |
| | | SAEEALLKPNVAYTFFSSKYVKKINKAVEA |
| | | FMFLNWAEELVYDFTDETNEVTTMDKIADI |
| | | TIIVPYIGPALNIGNMLSKGEFVEAIIFTG |
| | | VVAMLEFIPEYALPVFGTFAIVSYIANKVL |
| | | TVQTINNALSKRNEKWDEVYKYTVTNWLAK |
| | | VNTQIDLIREKMKKALENQAEATKAIINYQ |
| | | YNQYTEEEKNNINFNIDDLSSKLNESINSA |
| | | MININKFLDQCSVSYLMNSMIPYAVKRLKD |
| | | FDASVRDVLLKYIYDNRGTLVLQVDRLKDE |
| | | VNNTLSADIPFQLSKYVDNKKLLSTFTEYI |
| | | KNIVNTSILSIVYKKDDLIDLSRYGAKINI |
| | | GDRVYYDSIDKNQIKLINLESSTIEVILKN |
| | | AIVYNSMYENFSTSFWIKIPKYFSKINLNN |
| | | EYTIINCIENNSGWKVSLNYGEIIWTLQDN |
| | | KQNIQRVVFKYSQMVNISDYINRWIFVTIT |
| | | NNRLTKSKIYINGRLIDQKPISNLGNIHAS |
| | | NKIMFKLDGCRDPRRYIMIKYFNLFDKELN |
| | | EKEIKDLYDNQSNSGILKDFWGNYLQYDKP |
| | | YYMLNLFDPNKYVDVNNIGIRGYMYLKGPR |
| | | GSVVTTNIYLNSTLYEGTKFIIKKYASGNE |
| | | DNIVRNNDRVYINVVVKNKEYRLATNASQA |
| | | GVEKILSALEIPDVGNLSQVVVMKSKDDQG |
| | | IRNKCKMNLQDNNGNDIGFIGFHLYDNIAK |
| | | LVASNWYNRQVGKASRTFGCSWEFIPVDDG |
| | | WGESSL |
| 41 | BoNT/ | MPFVNKQFNYKDPVNGVDIAYIKIPNAGQM |
| | A2-N1103D | QPVKAFKIHNKIWVIPERDTFTNPEEGDLN |
| | | PPPEAKQVPVSYYDSTYLSTDNEKDNYLKG |
| | | VTKLFERIYSTDLGRMLLTSIVRGIPFWGG |
| | | STIDTELKVIDTNCINVIQPDGSYRSEELN |
| | | LVIIGPSADIIQFECKSFGHDVLNLTRNGY |
| | | GSTQYIRFSPDFTFGFEESLEVDTNPLLGA |
| | | GKFATDPAVTLAHELIHAEHRLYGIAINPN |
| | | RVFKVNTNAYYEMSGLEVSFEELRTFGGHD |
| | | AKFIDSLQENEFRLYYYNKFKDVASTLNKA |
| | | KSIIGTTASLQYMKNVFKEKYLLSEDTSGK |
| | | FSVDKLKFDKLYKMLTEIYTEDNFVNFFKV |
| | | INRKTYLNFDKAVFRINIVPDENYTIKDGF |
| | | NLKGANLSTNFNGQNTEINSRNFTRLKNFT |
| | | GLFEFYKLLCVRGIIPFKTKSLDEGYNKAL |
| | | NDLCIKVNNWDLFFSPSEDNFTNDLDKVEE |
| | | ITADTNIEAAEENISLDLIQQYYLTFDFDN |
| | | EPENISIENLSSDIIGQLEPMPNIERFPNG |
| | | KKYELDKYTMFHYLRAQEFEHGDSRIILTN |
| | | SAEEALLKPNVAYTFFSSKYVKKINKAVEA |
| | | FMFLNWAEELVYDFTDETNEVTTMDKIADI |
| | | TIIVPYIGPALNIGNMLSKGEFVEAIIFTG |
| | | VVAMLEFIPEYALPVFGTFAIVSYIANKVL |
| | | TVQTINNALSKRNEKWDEVYKYTVTNWLAK |
| | | VNTQIDLIREKMKKALENQAEATKAIINYQ |
| | | YNQYTEEEKNNINFNIDDLSSKLNESINSA |
| | | MININKFLDQCSVSYLMNSMIPYAVKRLKD |
| | | FDASVRDVLLKYIYDNRGTLVLQVDRLKDE |
| | | VNNTLSADIPFQLSKYVDNKKLLSTFTEYI |
| | | KNIVNTSILSIVYKKDDLIDLSRYGAKINI |
| | | GDRVYYDSIDKNQIKLINLESSTIEVILKN |
| | | AIVYNSMYENFSTSFWIKIPKYFSKINLNN |
| | | EYTIINCIENNSGWKVSLNYGEIIWTLQDN |
| | | KQNIQRVVFKYSQMVNISDYINRWIFVTIT |
| | | NNRLTKSKIYINGRLIDQKPISNLGNIHAS |
| | | NKIMFKLDGCRDPRRYIMIKYFNLFDKELN |
| | | EKEIKDLYDSQSNSGILKDFWGDYLQYDKP |
| | | YYMLNLFDPNKYVDVNNIGIRGYMYLKGPR |
| | | GSVVTTNIYLNSTLYEGTKFIIKKYASGNE |
| | | DNIVRNNDRVYINVVVKNKEYRLATNASQA |
| | | GVEKILSALEIPDVGNLSQVVVMKSKDDQG |
| | | IRNKCKMNLQDNNGNDIGFIGFHLYDNIAK |
| | | LVASNWYNRQVGKASRTFGCSWEFIPVDDG |
| | | WGESSL |
| 42 | BoNT/ | MPFVNKQFNYKDPVNGVDIAYIKIPNAGQM |
| | | QPVKAFKIHNKIWVIPERDTFTNPEEGDLN |
| | A2-F1117Y | PPPEAKQVPVSYYDSTYLSTDNEKDNYLKG |
| | | VTKLFERIYSTDLGRMLLTSIVRGIPFWGG |
| | | STIDTELKVIDTNCINVIQPDGSYRSEELN |
| | | LVIIGPSADIIQFECKSFGHDVLNLTRNGY |
| | | GSTQYIRFSPDFTFGFEESLEVDTNPLLGA |
| | | GKFATDPAVTLAHELIHAEHRLYGIAINPN |
| | | RVFKVNTNAYYEMSGLEVSFEELRTFGGHD |
| | | AKFIDSLQENEFRLYYYNKFKDVASTLNKA |
| | | KSIIGTTASLQYMKNVFKEKYLLSEDTSGK |
| | | FSVDKLKFDKLYKMLTEIYTEDNFVNFFKV |
| | | INRKTYLNFDKAVFRINIVPDENYTIKDGF |
| | | NLKGANLSTNFNGQNTEINSRNFTRLKNFT |
| | | GLFEFYKLLCVRGIIPFKTKSLDEGYNKAL |
| | | NDLCIKVNNWDLFFSPSEDNFTNDLDKVEE |
| | | ITADTNIEAAEENISLDLIQQYYLTFDFDN |
| | | EPENISIENLSSDIIGQLEPMPNIERFPNG |
| | | KKYELDKYTMFHYLRAQEFEHGDSRIILTN |
| | | SAEEALLKPNVAYTFFSSKYVKKINKAVEA |
| | | FMFLNWAEELVYDFTDETNEVTTMDKIADI |
| | | TIIVPYIGPALNIGNMLSKGEFVEAIIFTG |
| | | VVAMLEFIPEYALPVFGTFAIVSYIANKVL |
| | | TVQTINNALSKRNEKWDEVYKYTVTNWLAK |
| | | VNTQIDLIREKMKKALENQAEATKAIINYQ |
| | | YNQYTEEEKNNINFNIDDLSSKLNESINSA |
| | | MININKFLDQCSVSYLMNSMIPYAVKRLKD |
| | | FDASVRDVLLKYIYDNRGTLVLQVDRLKDE |
| | | VNNTLSADIPFQLSKYVDNKKLLSTFTEYI |
| | | KNIVNTSILSIVYKKDDLIDLSRYGAKINI |
| | | GDRVYYDSIDKNQIKLINLESSTIEVILKN |
| | | AIVYNSMYENFSTSFWIKIPKYFSKINLNN |
| | | EYTIINCIENNSGWKVSLNYGEIIWTLQDN |
| | | KQNIQRVVFKYSQMVNISDYINRWIFVTIT |
| | | NNRLTKSKIYINGRLIDQKPISNLGNIHAS |
| | | NKIMFKLDGCRDPRRYIMIKYFNLFDKELN |
| | | EKEIKDLYDSQSNSGILKDFWGNYLQYDKP |
| | | YYMLNLYDPNKYVDVNNIGIRGYMYLKGPR |
| | | GSVVTTNIYLNSTLYEGTKFIIKKYASGNE |
| | | DNIVRNNDRVYINVVVKNKEYRLATNASQA |
| | | GVEKILSALEIPDVGNLSQVVVMKSKDDQG |
| | | IRNKCKMNLQDNNGNDIGFIGFHLYDNIAK |
| | | LVASNWYNRQVGKASRTFGCSWEFIPVDDG |
| | | WGESSL |
| 43 | BoNT/ | MPFVNKQFNYKDPVNGVDIAYIKIPNAGQMQ |
| | A2-E1156M | PVKAFKIHNKIWVIPERDTFTNPEEGDLNP |
| | | PPEAKQVPVSYYDSTYLSTDNEKDNYLKGV |
| | | TKLFERIYSTDLGRMLLTSIVRGIPFWGGS |
| | | TIDTELKVIDTNCINVIQPDGSYRSEELNL |
| | | VIIGPSADIIQFECKSFGHDVLNLTRNGYG |
| | | STQYIRFSPDFTFGFEESLEVDTNPLLGAG |
| | | KFATDPAVTLAHELIHAEHRLYGIAINPNR |
| | | VFKVNTNAYYEMSGLEVSFEELRTFGGHDA |
| | | KFIDSLQENEFRLYYYNKFKDVASTLNKAK |
| | | SIIGTTASLQYMKNVFKEKYLLSEDTSGKF |
| | | SVDKLKFDKLYKMLTEIYTEDNFVNFFKVI |
| | | NRKTYLNFDKAVFRINIVPDENYTIKDGFN |
| | | LKGANLSTNFNGQNTEINSRNFTRLKNFTG |
| | | LFEFYKLLCVRGIIPFKTKSLDEGYNKALN |
| | | DLCIKVNNWDLFFSPSEDNFTNDLDKVEEI |
| | | TADTNIEAAEENISLDLIQQYYLTFDFDNE |
| | | PENISIENLSSDIIGQLEPMPNIERFPNGK |
| | | KYELDKYTMFHYLRAQEFEHGDSRIILTNS |
| | | AEEALLKPNVAYTFFSSKYVKKINKAVEAF |
| | | MFLNWAEELVYDFTDETNEVTTMDKIADIT |
| | | IIVPYIGPALNIGNMLSKGEFVEAIIFTGV |
| | | VAMLEFIPEYALPVFGTFAIVSYIANKVLT |
| | | VQTINNALSKRNEKWDEVYKYTVTNWLAKV |
| | | NTQIDLIREKMKKALENQAEATKAIINYQY |
| | | NQYTEEEKNNINFNIDDLSSKLNESINSAM |
| | | ININKFLDQCSVSYLMNSMIPYAVKRLKDF |
| | | DASVRDVLLKYIYDNRGTLVLQVDRLKDEV |
| | | NNTLSADIPFQLSKYVDNKKLLSTFTEYIK |
| | | NIVNTSILSIVYKKDDLIDLSRYGAKINIG |
| | | DRVYYDSIDKNQIKLINLESSTIEVILKNA |
| | | IVYNSMYENFSTSFWIKIPKYFSKINLNNE |
| | | YTIINCIENNSGWKVSLNYGEIIWTLQDNK |
| | | QNIQRVVFKYSQMVNISDYINRWIFVTITN |
| | | NRLTKSKIYINGRLIDQKPISNLGNIHASN |
| | | KIMFKLDGCRDPRRYIMIKYFNLFDKELNE |
| | | KEIKDLYDSQSNSGILKDFWGNYLQYDKPY |
| | | YMLNLFDPNKYVDVNNIGIRGYMYLKGPRG |
| | | SVVTTNIYLNSTLYMGTKFIIKKYASGNED |
| | | NIVRNNDRVYINVVVKNKEYRLATNASQAG |
| | | VEKILSALEIPDVGNLSQVVVMKSKDDQGI |
| | | RNKCKMNLQDNNGNDIGFIGFHLYDNIAKL |
| | | VASNWYNRQVGKASRTFGCSWEFIPVDDGW |
| | | GESSL |
| 44 | BoNT/ | MPFVNKQFNYKDPVNGVDIAYIKIPNAGQM |
| | A2-E1170K | QPVKAFKIHNKIWVIPERDTFTNPEEGDLN |
| | | PPPEAKQVPVSYYDSTYLSTDNEKDNYLKG |
| | | VTKLFERIYSTDLGRMLLTSIVRGIPFWGG |
| | | STIDTELKVIDTNCINVIQPDGSYRSEELN |
| | | LVIIGPSADIIQFECKSFGHDVLNLTRNGY |
| | | GSTQYIRFSPDFTFGFEESLEVDTNPLLGA |
| | | GKFATDPAVTLAHELIHAEHRLYGIAINPN |
| | | RVFKVNTNAYYEMSGLEVSFEELRTFGGHD |
| | | AKFIDSLQENEFRLYYYNKFKDVASTLNKA |
| | | KSIIGTTASLQYMKNVFKEKYLLSEDTSGK |
| | | FSVDKLKFDKLYKMLTEIYTEDNFVNFFKV |
| | | INRKTYLNFDKAVFRINIVPDENYTIKDGF |
| | | NLKGANLSTNFNGQNTEINSRNFTRLKNFT |
| | | GLFEFYKLLCVRGIIPFKTKSLDEGYNKAL |
| | | NDLCIKVNNWDLFFSPSEDNFTNDLDKVEE |
| | | ITADTNIEAAEENISLDLIQQYYLTFDFDN |
| | | EPENISIENLSSDIIGQLEPMPNIERFPNG |
| | | KKYELDKYTMFHYLRAQEFEHGDSRIILTN |
| | | SAEEALLKPNVAYTFFSSKYVKKINKAVEA |
| | | FMFLNWAEELVYDFTDETNEVTTMDKIADI |
| | | TIIVPYIGPALNIGNMLSKGEFVEAIIFTG |
| | | VVAMLEFIPEYALPVFGTFAIVSYIANKVL |
| | | TVQTINNALSKRNEKWDEVYKYTVTNWLAK |
| | | VNTQIDLIREKMKKALENQAEATKAIINYQ |
| | | YNQYTEEEKNNINFNIDDLSSKLNESINSA |
| | | MININKFLDQCSVSYLMNSMIPYAVKRLKD |
| | | FDASVRDVLLKYIYDNRGTLVLQVDRLKDE |
| | | VNNTLSADIPFQLSKYVDNKKLLSTFTEYI |
| | | KNIVNTSILSIVYKKDDLIDLSRYGAKINI |
| | | GDRVYYDSIDKNQIKLINLESSTIEVILKN |
| | | AIVYNSMYENFSTSFWIKIPKYFSKINLNN |
| | | EYTIINCIENNSGWKVSLNYGEIIWTLQDN |
| | | KQNIQRVVFKYSQMVNISDYINRWIFVTIT |
| | | NNRLTKSKIYINGRLIDQKPISNLGNIHAS |
| | | NKIMFKLDGCRDPRRYIMIKYFNLFDKELN |
| | | EKEIKDLYDSQSNSGILKDFWGNYLQYDKP |
| | | YYMLNLFDPNKYVDVNNIGIRGYMYLKGPR |
| | | GSVVTTNIYLNSTLYEGTKFIIKKYASGNK |
| | | DNIVRNNDRVYINVVVKNKEYRLATNASQA |
| | | GVEKILSALEIPDVGNLSQVVVMKSKDDQG |
| | | IRNKCKMNLQDNNGNDIGFIGFHLYDNIAK |
| | | LVASNWYNRQVGKASRTFGCSWEFIPVDDG |
| | | WGESSL |
| 45 | BoNT/ | MPFVNKQFNYKDPVNGVDIAYIKIPNAGQM |
| | A2-D1227N | QPVKAFKIHNKIWVIPERDTFTNPEEGDLN |
| | | PPPEAKQVPVSYYDSTYLSTDNEKDNYLKG |
| | | VTKLFERIYSTDLGRMLLTSIVRGIPFWGG |
| | | STIDTELKVIDTNCINVIQPDGSYRSEELN |
| | | LVIIGPSADIIQFECKSFGHDVLNLTRNGY |
| | | GSTQYIRFSPDFTFGFEESLEVDTNPLLGA |
| | | GKFATDPAVTLAHELIHAEHRLYGIAINPN |
| | | RVFKVNTNAYYEMSGLEVSFEELRTFGGHD |
| | | AKFIDSLQENEFRLYYYNKFKDVASTLNKA |
| | | KSIIGTTASLQYMKNVFKEKYLLSEDTSGK |
| | | FSVDKLKFDKLYKMLTEIYTEDNFVNFFKV |
| | | INRKTYLNFDKAVFRINIVPDENYTIKDGF |
| | | NLKGANLSTNFNGQNTEINSRNFTRLKNFT |
| | | GLFEFYKLLCVRGIIPFKTKSLDEGYNKAL |
| | | NDLCIKVNNWDLFFSPSEDNFTNDLDKVEE |
| | | ITADTNIEAAEENISLDLIQQYYLTFDFDN |
| | | EPENISIENLSSDIIGQLEPMPNIERFPNG |
| | | KKYELDKYTMFHYLRAQEFEHGDSRIILTN |
| | | SAEEALLKPNVAYTFFSSKYVKKINKAVEA |
| | | FMFLNWAEELVYDFTDETNEVTTMDKIADI |
| | | TIIVPYIGPALNIGNMLSKGEFVEAIIFTG |
| | | VVAMLEFIPEYALPVFGTFAIVSYIANKVL |
| | | TVQTINNALSKRNEKWDEVYKYTVTNWLAK |
| | | VNTQIDLIREKMKKALENQAEATKAIINYQ |
| | | YNQYTEEEKNNINFNIDDLSSKLNESINSA |
| | | MININKFLDQCSVSYLMNSMIPYAVKRLKD |
| | | FDASVRDVLLKYIYDNRGTLVLQVDRLKDE |
| | | VNNTLSADIPFQLSKYVDNKKLLSTFTEYI |
| | | KNIVNTSILSIVYKKDDLIDLSRYGAKINI |
| | | GDRVYYDSIDKNQIKLINLESSTIEVILKN |
| | | AIVYNSMYENFSTSFWIKIPKYFSKINLNN |
| | | EYTIINCIENNSGWKVSLNYGEIIWTLQDN |
| | | KQNIQRVVFKYSQMVNISDYINRWIFVTIT |
| | | NNRLTKSKIYINGRLIDQKPISNLGNIHAS |
| | | NKIMFKLDGCRDPRRYIMIKYFNLFDKELN |
| | | EKEIKDLYDSQSNSGILKDFWGNYLQYDKP |
| | | YYMLNLFDPNKYVDVNNIGIRGYMYLKGPR |
| | | GSVVTTNIYLNSTLYEGTKFIIKKYASGNE |
| | | DNIVRNNDRVYINVVVKNKEYRLATNASQA |
| | | GVEKILSALEIPDVGNLSQVVVMKSKNDQG |
| | | IRNKCKMNLQDNNGNDIGFIGFHLYDNIAK |
| | | LVASNWYNRQVGKASRTFGCSWEFIPVDDG |
| | | WGESSL |
| 46 | BoNT/ | MPFVNKQFNYKDPVNGVDIAYIKIPNAGQM |
| | A2-L1254Q | QPVKAFKIHNKIWVIPERDTFTNPEEGDLN |
| | | PPPEAKQVPVSYYDSTYLSTDNEKDNYLKG |
| | | VTKLFERIYSTDLGRMLLTSIVRGIPFWGG |
| | | STIDTELKVIDTNCINVIQPDGSYRSEELN |
| | | LVIIGPSADIIQFECKSFGHDVLNLTRNGY |
| | | GSTQYIRFSPDFTFGFEESLEVDTNPLLGA |
| | | GKFATDPAVTLAHELIHAEHRLYGIAINPN |
| | | RVFKVNTNAYYEMSGLEVSFEELRTFGGHD |
| | | AKFIDSLQENEFRLYYYNKFKDVASTLNKA |
| | | KSIIGTTASLQYMKNVFKEKYLLSEDTSGK |
| | | FSVDKLKFDKLYKMLTEIYTEDNFVNFFKV |
| | | INRKTYLNFDKAVFRINIVPDENYTIKDGF |
| | | NLKGANLSTNFNGQNTEINSRNFTRLKNFT |
| | | GLFEFYKLLCVRGIIPFKTKSLDEGYNKAL |
| | | NDLCIKVNNWDLFFSPSEDNFTNDLDKVEE |
| | | ITADTNIEAAEENISLDLIQQYYLTFDFDN |
| | | EPENISIENLSSDIIGQLEPMPNIERFPNG |
| | | KKYELDKYTMFHYLRAQEFEHGDSRIILTN |
| | | SAEEALLKPNVAYTFFSSKYVKKINKAVEA |
| | | FMFLNWAEELVYDFTDETNEVTTMDKIADI |
| | | TIIVPYIGPALNIGNMLSKGEFVEAIIFTG |
| | | VVAMLEFIPEYALPVFGTFAIVSYIANKVL |
| | | TVQTINNALSKRNEKWDEVYKYTVTNWLAK |
| | | VNTQIDLIREKMKKALENQAEATKAIINYQ |
| | | YNQYTEEEKNNINFNIDDLSSKLNESINSA |
| | | MININKFLDQCSVSYLMNSMIPYAVKRLKD |
| | | FDASVRDVLLKYIYDNRGTLVLQVDRLKDE |
| | | VNNTLSADIPFQLSKYVDNKKLLSTFTEYI |
| | | KNIVNTSILSIVYKKDDLIDLSRYGAKINI |
| | | GDRVYYDSIDKNQIKLINLESSTIEVILKN |
| | | AIVYNSMYENFSTSFWIKIPKYFSKINLNN |
| | | EYTIINCIENNSGWKVSLNYGEIIWTLQDN |
| | | KQNIQRVVFKYSQMVNISDYINRWIFVTIT |
| | | NNRLTKSKIYINGRLIDQKPISNLGNIHAS |
| | | NKIMFKLDGCRDPRRYIMIKYFNLFDKELN |
| | | EKEIKDLYDSQSNSGILKDFWGNYLQYDKP |
| | | YYMLNLFDPNKYVDVNNIGIRGYMYLKGPR |
| | | GSVVTTNIYLNSTLYEGTKFIIKKYASGNE |
| | | DNIVRNNDRVYINVVVKNKEYRLATNASQA |
| | | GVEKILSALEIPDVGNLSQVVVMKSKDDQG |
| | | IRNKCKMNLQDNNGNDIGFIGFHQYDNIAK |
| | | LVASNWYNRQVGKASRTFGCSWEFIPVDDG |
| | | WGESSL |
| 47 | BoNT/ | MPFVNKQFNYKDPVNGVDIAYIKIPNAGQM |
| | A2-Y1255F | QPVKAFKIHNKIWVIPERDTFTNPEEGDLN |
| | | PPPEAKQVPVSYYDSTYLSTDNEKDNYLKG |
| | | VTKLFERIYSTDLGRMLLTSIVRGIPFWGG |
| | | STIDTELKVIDTNCINVIQPDGSYRSEELN |
| | | LVIIGPSADIIQFECKSFGHDVLNLTRNGY |
| | | GSTQYIRFSPDFTFGFEESLEVDTNPLLGA |
| | | GKFATDPAVTLAHELIHAEHRLYGIAINPN |
| | | RVFKVNTNAYYEMSGLEVSFEELRTFGGHD |
| | | AKFIDSLQENEFRLYYYNKFKDVASTLNKA |
| | | KSIIGTTASLQYMKNVFKEKYLLSEDTSGK |
| | | FSVDKLKFDKLYKMLTEIYTEDNFVNFFKV |
| | | INRKTYLNFDKAVFRINIVPDENYTIKDGF |
| | | NLKGANLSTNFNGQNTEINSRNFTRLKNFT |
| | | GLFEFYKLLCVRGIIPFKTKSLDEGYNKAL |
| | | NDLCIKVNNWDLFFSPSEDNFTNDLDKVEE |
| | | ITADTNIEAAEENISLDLIQQYYLTFDFDN |
| | | EPENISIENLSSDIIGQLEPMPNIERFPNG |
| | | KKYELDKYTMFHYLRAQEFEHGDSRIILTN |
| | | SAEEALLKPNVAYTFFSSKYVKKINKAVEA |
| | | FMFLNWAEELVYDFTDETNEVTTMDKIADI |
| | | TIIVPYIGPALNIGNMLSKGEFVEAIIFTG |
| | | VVAMLEFIPEYALPVFGTFAIVSYIANKVL |
| | | TVQTINNALSKRNEKWDEVYKYTVTNWLAK |
| | | VNTQIDLIREKMKKALENQAEATKAIINYQ |
| | | YNQYTEEEKNNINFNIDDLSSKLNESINSA |
| | | MININKFLDQCSVSYLMNSMIPYAVKRLKD |
| | | FDASVRDVLLKYIYDNRGTLVLQVDRLKDE |
| | | VNNTLSADIPFQLSKYVDNKKLLSTFTEYI |
| | | KNIVNTSILSIVYKKDDLIDLSRYGAKINI |
| | | GDRVYYDSIDKNQIKLINLESSTIEVILKN |
| | | AIVYNSMYENFSTSFWIKIPKYFSKINLNN |
| | | EYTIINCIENNSGWKVSLNYGEIIWTLQDN |
| | | KQNIQRVVFKYSQMVNISDYINRWIFVTIT |
| | | NNRLTKSKIYINGRLIDQKPISNLGNIHAS |
| | | NKIMFKLDGCRDPRRYIMIKYFNLFDKELN |
| | | EKEIKDLYDSQSNSGILKDFWGNYLQYDKP |
| | | YYMLNLFDPNKYVDVNNIGIRGYMYLKGPR |
| | | GSVVTTNIYLNSTLYEGTKFIIKKYASGNE |
| | | DNIVRNNDRVYINVVVKNKEYRLATNASQA |
| | | GVEKILSALEIPDVGNLSQVVVMKSKDDQG |
| | | IRNKCKMNLQDNNGNDIGFIGFHLFDNIAK |
| | | LVASNWYNRQVGKASRTFGCSWEFIPVDDG |
| | | WGESSL |
| 48 | BoNT/ | MPFVNKQFNYKDPVNGVDIAYIKIPNAGQM |
| | A2-D1256N | QPVKAFKIHNKIWVIPERDTFTNPEEGDLN |
| | | PPPEAKQVPVSYYDSTYLSTDNEKDNYLKG |
| | | VTKLFERIYSTDLGRMLLTSIVRGIPFWGG |
| | | STIDTELKVIDTNCINVIQPDGSYRSEELN |
| | | LVIIGPSADIIQFECKSFGHDVLNLTRNGY |
| | | GSTQYIRFSPDFTFGFEESLEVDTNPLLGA |
| | | GKFATDPAVTLAHELIHAEHRLYGIAINPN |
| | | RVFKVNTNAYYEMSGLEVSFEELRTFGGHD |
| | | AKFIDSLQENEFRLYYYNKFKDVASTLNKA |
| | | KSIIGTTASLQYMKNVFKEKYLLSEDTSGK |
| | | FSVDKLKFDKLYKMLTEIYTEDNFVNFFKV |
| | | INRKTYLNFDKAVFRINIVPDENYTIKDGF |
| | | NLKGANLSTNFNGQNTEINSRNFTRLKNFT |
| | | GLFEFYKLLCVRGIIPFKTKSLDEGYNKAL |
| | | NDLCIKVNNWDLFFSPSEDNFTNDLDKVEE |
| | | ITADTNIEAAEENISLDLIQQYYLTFDFDN |
| | | EPENISIENLSSDIIGQLEPMPNIERFPNG |
| | | KKYELDKYTMFHYLRAQEFEHGDSRIILTN |
| | | SAEEALLKPNVAYTFFSSKYVKKINKAVEA |
| | | FMFLNWAEELVYDFTDETNEVTTMDKIADI |
| | | TIIVPYIGPALNIGNMLSKGEFVEAIIFTG |
| | | VVAMLEFIPEYALPVFGTFAIVSYIANKVL |
| | | TVQTINNALSKRNEKWDEVYKYTVTNWLAK |
| | | VNTQIDLIREKMKKALENQAEATKAIINYQ |
| | | YNQYTEEEKNNINFNIDDLSSKLNESINSA |
| | | MININKFLDQCSVSYLMNSMIPYAVKRLKD |
| | | FDASVRDVLLKYIYDNRGTLVLQVDRLKDE |
| | | VNNTLSADIPFQLSKYVDNKKLLSTFTEYI |
| | | KNIVNTSILSIVYKKDDLIDLSRYGAKINI |
| | | GDRVYYDSIDKNQIKLINLESSTIEVILKN |
| | | AIVYNSMYENFSTSFWIKIPKYFSKINLNN |
| | | EYTIINCIENNSGWKVSLNYGEIIWTLQDN |
| | | KQNIQRVVFKYSQMVNISDYINRWIFVTIT |
| | | NNRLTKSKIYINGRLIDQKPISNLGNIHAS |
| | | NKIMFKLDGCRDPRRYIMIKYFNLFDKELN |
| | | EKEIKDLYDSQSNSGILKDFWGNYLQYDKP |
| | | YYMLNLFDPNKYVDVNNIGIRGYMYLKGPR |
| | | GSVVTTNIYLNSTLYEGTKFIIKKYASGNE |
| | | DNIVRNNDRVYINVVVKNKEYRLATNASQA |
| | | GVEKILSALEIPDVGNLSQVVVMKSKDDQG |
| | | IRNKCKMNLQDNNGNDIGFIGFHLYNNIAK |
| | | LVASNWYNRQVGKASRTFGCSWEFIPVDDG |
| | | WGESSL |
| 49 | WT receptor | IINTSILNLRYESNHLIDLSRYASKINIGS |
| | binding | KVNFDPIDKNQIQLFNLESSKIEVILKNAI |
| | domain (H_{c}) | VYNSMYENFSTSFWIRIPKYFNSISLNNEY |
| | BoNT/ | TIINCMENNSGWKVSLNYGEIIWTLQDTQE |
| | A1- | IKQRVVFKYSQMINISDYINRWIFVTITNN |
| | residues 873- | RLNNSKIYINGRLIDQKPISNLGNIHASNN |
| | 1296 of full | IMFKLDGCRDTHRYIWIKYFNLFDKELNEK |
| | length | EIKDLYDNQSNSGILKDFWGDYLQYDKPYY |
| | | MLNLYDPNKYVDVNNVGIRGYMYLKGPRGS |
| | | VMTTNIYLNSSLYRGTKFIIKKYASGNKDN |
| | | IVRNNDRVYINVVVKNKEYRLATNASQAGV |
| | | EKILSALEIPDVGNLSQVVVMKSKNDQGIT |
| | | NKCKMNLQDNNGNDIGFIGFHQFNNIAKLV |
| | | ASNWYNRQIERSSRTLGCSWEFIPVDDGWG |
| | | ERPL |
| 50 | WT receptor | SLIVNTSILSIVYKKDDLIDLSRYGAKINI |
| | binding | GDRVYYDSIDKNQIKLINLESSTIEVILKN |
| | domain (H_{c}) | AIVYNSMYENFSTSFWIKIPKYFSKINLNN |
| | BoNT/ | EYTIINCIENNSGWKVSLNYGEIIWTLQDN |
| | A2- | KQNIQRVVFKYSQMVNISDYINRWIFVTIT |
| | residues 873- | NNRLTKSKIYINGRLIDQKPISNLGNIHAS |
| | 1296 of full | NKIMFKLDGCRDPRRYIMIKYFNLFDKELN |
| | length | EKEIKDLYDSQSNSGILKDFWGNYLQYDKP |
| | | YYMLNLFDPNKYVDVNNIGIRGYMYLKGPR |
| | | GSVVTTNIYLNSTLYEGTKFIIKKYASGNE |
| | | DNIVRNNDRVYINVVVKNKEYRLATNASQA |
| | | GVEKILSALEIPDVGNLSQVVVMKSKDDQG |
| | | IRNKCKMNLQDNNGNDIGFIGFHLYDNIAK |
| | | LVASNWYNRQVGKASRTFGCSWEFIPVDDG |
| | | WGES |
| 51 | H_{c}-BoNT/ | IINTSILNLRYESNHLIDLSRYASKINIGS |
| | A1- | KVNFDPIDKNQIQLRNLESSKIEVILKNAI |
| | F917R (of full | VYNSMYENFSTSFWIRIPKYFNSISLNNEY |
| | length) | TIINCMENNSGWKVSLNYGEIIWTLQDTQE |
| | | IKQRVVFKYSQMINISDYINRWIFVTITNN |
| | | RLNNSKIYINGRLIDQKPISNLGNIHASNN |
| | | IMFKLDGCRDTHRYIWIKYFNLFDKELNEK |
| | | EIKDLYDNQSNSGILKDFWGDYLQYDKPYY |
| | | MLNLYDPNKYVDVNNVGIRGYMYLKGPRGS |
| | | VMTTNIYLNSSLYRGTKFIIKKYASGNKDN |
| | | IVRNNDRVYINVVVKNKEYRLATNASQAGV |
| | | EKILSALEIPDVGNLSQVVVMKSKNDQGIT |
| | | NKCKMNLQDNNGNDIGFIGFHQFNNIAKLV |
| | | ASNWYNRQIERSSRTLGCSWEFIPVDDGWG |
| | | ERPL |
| 52 | H_{c}-BoNT/ | IINTSILNLRYESNHLIDLSRYASKINIGS |
| | A1- | KVNFDPIDKNQIQLKNLESSKIEVILKNAI |
| | F917K (of full | VYNSMYENFSTSFWIRIPKYFNSISLNNEY |
| | length) | TIINCMENNSGWKVSLNYGEIIWTLQDTQE |
| | | IKQRVVFKYSQMINISDYINRWIFVTITNN |
| | | RLNNSKIYINGRLIDQKPISNLGNIHASNN |
| | | IMFKLDGCRDTHRYIWIKYFNLFDKELNEK |
| | | EIKDLYDNQSNSGILKDFWGDYLQYDKPYY |
| | | MLNLYDPNKYVDVNNVGIRGYMYLKGPRGS |
| | | VMTTNIYLNSSLYRGTKFIIKKYASGNKDN |
| | | IVRNNDRVYINVVVKNKEYRLATNASQAGV |
| | | EKILSALEIPDVGNLSQVVVMKSKNDQGIT |
| | | NKCKMNLQDNNGNDIGFIGFHQFNNIAKLV |
| | | ASNWYNRQIERSSRTLGCSWEFIPVDDGWG |
| | | ERPL |
| 53 | H_{c}-BoNT/ | IINTSILNLRYESNHLIDLSRYASKINIGS |
| | A1- | KVNFDPIDKNQIQLFNLESSKIEVILKNAI |
| | F953H (of full | VYNSMYENFSTSFWIRIPKYHNSISLNNEY |
| | length) | TIINCMENNSGWKVSLNYGEIIWTLQDTQE |
| | | IKQRVVFKYSQMINISDYINRWIFVTITNN |
| | | RLNNSKIYINGRLIDQKPISNLGNIHASNN |
| | | IMFKLDGCRDTHRYIWIKYFNLFDKELNEK |
| | | EIKDLYDNQSNSGILKDFWGDYLQYDKPYY |
| | | MLNLYDPNKYVDVNNVGIRGYMYLKGPRGS |
| | | VMTTNIYLNSSLYRGTKFIIKKYASGNKDN |
| | | IVRNNDRVYINVVVKNKEYRLATNASQAGV |
| | | EKILSALEIPDVGNLSQVVVMKSKNDQGIT |
| | | NKCKMNLQDNNGNDIGFIGFHQFNNIAKLV |
| | | ASNWYNRQIERSSRTLGCSWEFIPVDDGWG |
| | | ERPL |
| 54 | H_{c}-BoNT/ | IINTSILNLRYESNHLIDLSRYASKINIGS |
| | A1- | KVNFDPIDKNQIQLFNLESSKIEVILKNAI |
| | F953Y (of full | VYNSMYENFSTSFWIRIPKYYNSISLNNEY |
| | length) | TIINCMENNSGWKVSLNYGEIIWTLQDTQE |
| | | IKQRVVFKYSQMINISDYINRWIFVTITNN |
| | | RLNNSKIYINGRLIDQKPISNLGNIHASNN |
| | | IMFKLDGCRDTHRYIWIKYFNLFDKELNEK |
| | | EIKDLYDNQSNSGILKDFWGDYLQYDKPYY |
| | | MLNLYDPNKYVDVNNVGIRGYMYLKGPRGS |
| | | VMTTNIYLNSSLYRGTKFIIKKYASGNKDN |
| | | IVRNNDRVYINVVVKNKEYRLATNASQAGV |
| | | EKILSALEIPDVGNLSQVVVMKSKNDQGIT |
| | | NKCKMNLQDNNGNDIGFIGFHQFNNIAKLV |
| | | ASNWYNRQIERSSRTLGCSWEFIPVDDGWG |
| | | ERPL |
| 55 | H_{c}-BoNT/ | IINTSILNLRYESNHLIDLSRYASKINIGS |
| | A1- | KVNFDPIDKNQIQLFNLESSKIEVILKNAI |
| | N954S (of full | VYNSMYENFSTSFWIRIPKYFSSISLNNEY |
| | length) | TIINCMENNSGWKVSLNYGEIIWTLQDTQE |
| | | IKQRVVFKYSQMINISDYINRWIFVTITNN |
| | | RLNNSKIYINGRLIDQKPISNLGNIHASNN |
| | | IMFKLDGCRDTHRYIWIKYFNLFDKELNEK |
| | | EIKDLYDNQSNSGILKDFWGDYLQYDKPYY |
| | | MLNLYDPNKYVDVNNVGIRGYMYLKGPRGS |
| | | VMTTNIYLNSSLYRGTKFIIKKYASGNKDN |
| | | IVRNNDRVYINVVVKNKEYRLATNASQAGV |
| | | EKILSALEIPDVGNLSQVVVMKSKNDQGIT |
| | | NKCKMNLQDNNGNDIGFIGFHQFNNIAKLV |
| | | ASNWYNRQIERSSRTLGCSWEFIPVDDGWG |
| | | ERPL |
| 56 | H_{c}-BoNT/ | IINTSILNLRYESNHLIDLSRYASKINIGS |
| | A1- | KVNFDPIDKNQIQLFNLESSKIEVILKNAI |
| | S955K (of full | VYNSMYENFSTSFWIRIPKYFNKISLNNEY |
| | length) | TIINCMENNSGWKVSLNYGEIIWTLQDTQE |
| | | IKQRVVFKYSQMINISDYINRWIFVTITNN |
| | | RLNNSKIYINGRLIDQKPISNLGNIHASNN |
| | | IMFKLDGCRDTHRYIWIKYFNLFDKELNEK |
| | | EIKDLYDNQSNSGILKDFWGDYLQYDKPYY |
| | | MLNLYDPNKYVDVNNVGIRGYMYLKGPRGS |
| | | VMTTNIYLNSSLYRGTKFIIKKYASGNKDN |
| | | IVRNNDRVYINVVVKNKEYRLATNASQAGV |
| | | EKILSALEIPDVGNLSQVVVMKSKNDQGIT |
| | | NKCKMNLQDNNGNDIGFIGFHQFNNIAKLV |
| | | ASNWYNRQIERSSRTLGCSWEFIPVDDGWG |
| | | ERPL |
| 57 | H_{c}-BoNT/ | IINTSILNLRYESNHLIDLSRYASKINIGS |
| | A1- | KVNFDPIDKNQIQLFNLESSKIEVILKNAI |
| | S957N (of full | VYNSMYENFSTSFWIRIPKYFNSINLNNEY |
| | length) | TIINCMENNSGWKVSLNYGEIIWTLQDTQE |
| | | IKQRVVFKYSQMINISDYINRWIFVTITNN |
| | | RLNNSKIYINGRLIDQKPISNLGNIHASNN |
| | | IMFKLDGCRDTHRYIWIKYFNLFDKELNEK |
| | | EIKDLYDNQSNSGILKDFWGDYLQYDKPYY |
| | | MLNLYDPNKYVDVNNVGIRGYMYLKGPRGS |
| | | VMTTNIYLNSSLYRGTKFIIKKYASGNKDN |
| | | IVRNNDRVYINVVVKNKEYRLATNASQAGV |
| | | EKILSALEIPDVGNLSQVVVMKSKNDQGIT |
| | | NKCKMNLQDNNGNDIGFIGFHQFNNIAKLV |
| | | ASNWYNRQIERSSRTLGCSWEFIPVDDGWG |
| | | ERPL |
| 58 | H_{c}-BoNT/ | IINTSILNLRYESNHLIDLSRYASKINIGS |
| | A1- | KVNFDPIDKNQIQLFNLESSKIEVILKNAI |
| | M9681 (of full | VYNSMYENFSTSFWIRIPKYFNSISLNNEY |
| | length) | TIINCIENNSGWKVSLNYGEIIWTLQDTQE |
| | | IKQRVVFKYSQMINISDYINRWIFVTITNN |
| | | RLNNSKIYINGRLIDQKPISNLGNIHASNN |
| | | IMFKLDGCRDTHRYIWIKYFNLFDKELNEK |
| | | EIKDLYDNQSNSGILKDFWGDYLQYDKPYY |
| | | MLNLYDPNKYVDVNNVGIRGYMYLKGPRGS |
| | | VMTTNIYLNSSLYRGTKFIIKKYASGNKDN |
| | | IVRNNDRVYINVVVKNKEYRLATNASQAGV |
| | | EKILSALEIPDVGNLSQVVVMKSKNDQGIT |
| | | NKCKMNLQDNNGNDIGFIGFHQFNNIAKLV |
| | | ASNWYNRQIERSSRTLGCSWEFIPVDDGWG |
| | | ERPL |
| 59 | H_{c}-BoNT/ | IINTSILNLRYESNHLIDLSRYASKINIGS |
| | A1- | KVNFDPIDKNQIQLFNLESSKIEVILKNAI |
| | N1025T (of | VYNSMYENFSTSFWIRIPKYFNSISLNNEY |
| | full length) | TIINCMENNSGWKVSLNYGEIIWTLQDTQE |
| | | IKQRVVFKYSQMINISDYINRWIFVTITNN |
| | | RLTNSKIYINGRLIDQKPISNLGNIHASNN |
| | | IMFKLDGCRDTHRYIWIKYFNLFDKELNEK |
| | | EIKDLYDNQSNSGILKDFWGDYLQYDKPYY |
| | | MLNLYDPNKYVDVNNVGIRGYMYLKGPRGS |
| | | VMTTNIYLNSSLYRGTKFIIKKYASGNKDN |
| | | IVRNNDRVYINVVVKNKEYRLATNASQAGV |
| | | EKILSALEIPDVGNLSQVVVMKSKNDQGIT |
| | | NKCKMNLQDNNGNDIGFIGFHQFNNIAKLV |
| | | ASNWYNRQIERSSRTLGCSWEFIPVDDGWG |
| | | ERPL |
| 60 | H_{c}-BoNT/ | IINTSILNLRYESNHLIDLSRYASKINIGS |
| | A1- | KVNFDPIDKNQIQLFNLESSKIEVILKNAI |
| | N1026K (of | VYNSMYENFSTSFWIRIPKYFNSISLNNEY |
| | full length) | TIINCMENNSGWKVSLNYGEIIWTLQDTQE |
| | | IKQRVVFKYSQMINISDYINRWIFVTITNN |
| | | RLNKSKIYINGRLIDQKPISNLGNIHASNN |
| | | IMFKLDGCRDTHRYIWIKYFNLFDKELNEK |
| | | EIKDLYDNQSNSGILKDFWGDYLQYDKPYY |
| | | MLNLYDPNKYVDVNNVGIRGYMYLKGPRGS |
| | | VMTTNIYLNSSLYRGTKFIIKKYASGNKDN |
| | | IVRNNDRVYINVVVKNKEYRLATNASQAGV |
| | | EKILSALEIPDVGNLSQVVVMKSKNDQGIT |
| | | NKCKMNLQDNNGNDIGFIGFHQFNNIAKLV |
| | | ASNWYNRQIERSSRTLGCSWEFIPVDDGWG |
| | | ERPL |
| 61 | H_{c}-BoNT/ | IINTSILNLRYESNHLIDLSRYASKINIGS |
| | A1- | KVNFDPIDKNQIQLFNLESSKIEVILKNAI |
| | N1052K (of | VYNSMYENFSTSFWIRIPKYFNSISLNNEY |
| | full length) | TIINCMENNSGWKVSLNYGEIIWTLQDTQE |
| | | IKQRVVFKYSQMINISDYINRWIFVTITNN |
| | | RLNNSKIYINGRLIDQKPISNLGNIHASNK |
| | | IMFKLDGCRDTHRYIWIKYFNLFDKELNEK |
| | | EIKDLYDNQSNSGILKDFWGDYLQYDKPYY |
| | | MLNLYDPNKYVDVNNVGIRGYMYLKGPRGS |
| | | VMTTNIYLNSSLYRGTKFIIKKYASGNKDN |
| | | IVRNNDRVYINVVVKNKEYRLATNASQAGV |
| | | EKILSALEIPDVGNLSQVVVMKSKNDQGIT |
| | | NKCKMNLQDNNGNDIGFIGFHQFNNIAKLV |
| | | ASNWYNRQIERSSRTLGCSWEFIPVDDGWG |
| | | ERPL |
| 62 | H_{c}-BoNT/ | IINTSILNLRYESNHLIDLSRYASKINIGS |
| | A1- | KVNFDPIDKNQIQLFNLESSKIEVILKNAI |
| | D1062E (of | VYNSMYENFSTSFWIRIPKYFNSISLNNEY |
| | full length) | TIINCMENNSGWKVSLNYGEIIWTLQDTQE |
| | | IKQRVVFKYSQMINISDYINRWIFVTITNN |
| | | RLNNSKIYINGRLIDQKPISNLGNIHASNN |
| | | IMFKLDGCRETHRYIWIKYFNLFDKELNEK |
| | | EIKDLYDNQSNSGILKDFWGDYLQYDKPYY |
| | | MLNLYDPNKYVDVNNVGIRGYMYLKGPRGS |
| | | VMTTNIYLNSSLYRGTKFIIKKYASGNKDN |
| | | IVRNNDRVYINVVVKNKEYRLATNASQAGV |
| | | EKILSALEIPDVGNLSQVVVMKSKNDQGIT |
| | | NKCKMNLQDNNGNDIGFIGFHQFNNIAKLV |
| | | ASNWYNRQIERSSRTLGCSWEFIPVDDGWG |
| | | ERPL |
| 63 | H_{c}-BoNT/ | IINTSILNLRYESNHLIDLSRYASKINIGS |
| | A1- | KVNFDPIDKNQIQLFNLESSKIEVILKNAI |
| | T1063P (of | VYNSMYENFSTSFWIRIPKYFNSISLNNEY |
| | full length) | TIINCMENNSGWKVSLNYGEIIWTLQDTQE |
| | | IKQRVVFKYSQMINISDYINRWIFVTITNN |
| | | RLNNSKIYINGRLIDQKPISNLGNIHASNN |
| | | IMFKLDGCRDPHRYIWIKYFNLFDKELNEK |
| | | EIKDLYDNQSNSGILKDFWGDYLQYDKPYY |
| | | MLNLYDPNKYVDVNNVGIRGYMYLKGPRGS |
| | | VMTTNIYLNSSLYRGTKFIIKKYASGNKDN |
| | | IVRNNDRVYINVVVKNKEYRLATNASQAGV |
| | | EKILSALEIPDVGNLSQVVVMKSKNDQGIT |
| | | NKCKMNLQDNNGNDIGFIGFHQFNNIAKLV |
| | | ASNWYNRQIERSSRTLGCSWEFIPVDDGWG |
| | | ERPL |
| 64 | H_{c}-BoNT/ | IINTSILNLRYESNHLIDLSRYASKINIGS |
| | A1- | KVNFDPIDKNQIQLFNLESSKIEVILKNAI |
| | H1064R (of | VYNSMYENFSTSFWIRIPKYFNSISLNNEY |
| | full length) | TIINCMENNSGWKVSLNYGEIIWTLQDTQE |
| | | IKQRVVFKYSQMINISDYINRWIFVTITNN |
| | | RLNNSKIYINGRLIDQKPISNLGNIHASNN |
| | | IMFKLDGCRDTRRYIWIKYFNLFDKELNEK |
| | | EIKDLYDNQSNSGILKDFWGDYLQYDKPYY |
| | | MLNLYDPNKYVDVNNVGIRGYMYLKGPRGS |
| | | VMTTNIYLNSSLYRGTKFIIKKYASGNKDN |
| | | IVRNNDRVYINVVVKNKEYRLATNASQAGV |
| | | EKILSALEIPDVGNLSQVVVMKSKNDQGIT |
| | | NKCKMNLQDNNGNDIGFIGFHQFNNIAKLV |
| | | ASNWYNRQIERSSRTLGCSWEFIPVDDGWG |
| | | ERPL |
| 65 | H_{c}-BoNT/ | IINTSILNLRYESNHLIDLSRYASKINIGS |
| | A1- | KVNFDPIDKNQIQLFNLESSKIEVILKNAI |
| | H1064Q (of | VYNSMYENFSTSFWIRIPKYFNSISLNNEY |
| | full length) | TIINCMENNSGWKVSLNYGEIIWTLQDTQE |
| | | IKQRVVFKYSQMINISDYINRWIFVTITNN |
| | | RLNNSKIYINGRLIDQKPISNLGNIHASNN |
| | | IMFKLDGCRDTQRYIWIKYFNLFDKELNEK |
| | | EIKDLYDNQSNSGILKDFWGDYLQYDKPYY |
| | | MLNLYDPNKYVDVNNVGIRGYMYLKGPRGS |
| | | VMTTNIYLNSSLYRGTKFIIKKYASGNKDN |
| | | IVRNNDRVYINVVVKNKEYRLATNASQAGV |
| | | EKILSALEIPDVGNLSQVVVMKSKNDQGIT |
| | | NKCKMNLQDNNGNDIGFIGFHQFNNIAKLV |
| | | ASNWYNRQIERSSRTLGCSWEFIPVDDGWG |
| | | ERPL |
| 66 | H_{c}-BoNT/ | IINTSILNLRYESNHLIDLSRYASKINIGS |
| | A1- | KVNFDPIDKNQIQLFNLESSKIEVILKNAI |
| | R1065N (of | VYNSMYENFSTSFWIRIPKYFNSISLNNEY |
| | full length) | TIINCMENNSGWKVSLNYGEIIWTLQDTQE |
| | | IKQRVVFKYSQMINISDYINRWIFVTITNN |
| | | RLNNSKIYINGRLIDQKPISNLGNIHASNN |
| | | IMFKLDGCRDTHNYIWIKYFNLFDKELNEK |
| | | EIKDLYDNQSNSGILKDFWGDYLQYDKPYY |
| | | MLNLYDPNKYVDVNNVGIRGYMYLKGPRGS |
| | | VMTTNIYLNSSLYRGTKFIIKKYASGNKDN |
| | | IVRNNDRVYINVVVKNKEYRLATNASQAGV |
| | | EKILSALEIPDVGNLSQVVVMKSKNDQGIT |
| | | NKCKMNLQDNNGNDIGFIGFHQFNNIAKLV |
| | | ASNWYNRQIERSSRTLGCSWEFIPVDDGWG |
| | | ERPL |
| 67 | H_{c}-BoNT/ | IINTSILNLRYESNHLIDLSRYASKINIGS |
| | A1- | KVNFDPIDKNQIQLFNLESSKIEVILKNAI |
| | Y1066R (of | VYNSMYENFSTSFWIRIPKYFNSISLNNEY |
| | full length) | TIINCMENNSGWKVSLNYGEIIWTLQDTQE |
| | | IKQRVVFKYSQMINISDYINRWIFVTITNN |
| | | RLNNSKIYINGRLIDQKPISNLGNIHASNN |
| | | IMFKLDGCRDTHRRIWIKYFNLFDKELNEK |
| | | EIKDLYDNQSNSGILKDFWGDYLQYDKPYY |
| | | MLNLYDPNKYVDVNNVGIRGYMYLKGPRGS |
| | | VMTTNIYLNSSLYRGTKFIIKKYASGNKDN |
| | | IVRNNDRVYINVVVKNKEYRLATNASQAGV |
| | | EKILSALEIPDVGNLSQVVVMKSKNDQGIT |
| | | NKCKMNLQDNNGNDIGFIGFHQFNNIAKLV |
| | | ASNWYNRQIERSSRTLGCSWEFIPVDDGWG |
| | | ERPL |
| 68 | H_{c}-BoNT/ | IINTSILNLRYESNHLIDLSRYASKINIGS |
| | A1- | KVNFDPIDKNQIQLFNLESSKIEVILKNAI |
| | Y1066K (of | VYNSMYENFSTSFWIRIPKYFNSISLNNEY |
| | full length) | TIINCMENNSGWKVSLNYGEIIWTLQDTQE |
| | | IKQRVVFKYSQMINISDYINRWIFVTITNN |
| | | RLNNSKIYINGRLIDQKPISNLGNIHASNN |
| | | IMFKLDGCRDTHRKIWIKYFNLFDKELNEK |
| | | EIKDLYDNQSNSGILKDFWGDYLQYDKPYY |
| | | MLNLYDPNKYVDVNNVGIRGYMYLKGPRGS |
| | | VMTTNIYLNSSLYRGTKFIIKKYASGNKDN |
| | | IVRNNDRVYINVVVKNKEYRLATNASQAGV |
| | | EKILSALEIPDVGNLSQVVVMKSKNDQGIT |
| | | NKCKMNLQDNNGNDIGFIGFHQFNNIAKLV |
| | | ASNWYNRQIERSSRTLGCSWEFIPVDDGWG |
| | | ERPL |
| 69 | H_{c}-BoNT/ | IINTSILNLRYESNHLIDLSRYASKINIGS |
| | A1- | KVNFDPIDKNQIQLFNLESSKIEVILKNAI |
| | T1145Y (of | VYNSMYENFSTSFWIRIPKYFNSISLNNEY |
| | full length) | TIINCMENNSGWKVSLNYGEIIWTLQDTQE |
| | | IKQRVVFKYSQMINISDYINRWIFVTITNN |
| | | RLNNSKIYINGRLIDQKPISNLGNIHASNN |
| | | IMFKLDGCRDTHRYIWIKYFNLFDKELNEK |
| | | EIKDLYDNQSNSGILKDFWGDYLQYDKPYY |
| | | MLNLYDPNKYVDVNNVGIRGYMYLKGPRGS |
| | | VMYTNIYLNSSLYRGTKFIIKKYASGNKDN |
| | | IVRNNDRVYINVVVKNKEYRLATNASQAGV |
| | | EKILSALEIPDVGNLSQVVVMKSKNDQGIT |
| | | NKCKMNLQDNNGNDIGFIGFHQFNNIAKLV |
| | | ASNWYNRQIERSSRTLGCSWEFIPVDDGWG |
| | | ERPL |
| 70 | H_{c}-BoNT/ | IINTSILNLRYESNHLIDLSRYASKINIGS |
| | A1- | KVNFDPIDKNQIQLFNLESSKIEVILKNAI |
| | R1156M (of | VYNSMYENFSTSFWIRIPKYFNSISLNNEY |
| | full length) | TIINCMENNSGWKVSLNYGEIIWTLQDTQE |
| | | IKQRVVFKYSQMINISDYINRWIFVTITNN |
| | | RLNNSKIYINGRLIDQKPISNLGNIHASNN |
| | | IMFKLDGCRDTHRYIWIKYFNLFDKELNEK |
| | | EIKDLYDNQSNSGILKDFWGDYLQYDKPYY |
| | | MLNLYDPNKYVDVNNVGIRGYMYLKGPRGS |
| | | VMTTNIYLNSSLYMGTKFIIKKYASGNKDN |
| | | IVRNNDRVYINVVVKNKEYRLATNASQAGV |
| | | EKILSALEIPDVGNLSQVVVMKSKNDQGIT |
| | | NKCKMNLQDNNGNDIGFIGFHQFNNIAKLV |
| | | ASNWYNRQIERSSRTLGCSWEFIPVDDGWG |
| | | ERPL |
| 71 | H_{c}-BoNT/ | IINTSILNLRYESNHLIDLSRYASKINIGS |
| | A1- | KVNFDPIDKNQIQLFNLESSKIEVILKNAI |
| | R11561 (of | VYNSMYENFSTSFWIRIPKYFNSISLNNEY |
| | full length) | TIINCMENNSGWKVSLNYGEIIWTLQDTQE |
| | | IKQRVVFKYSQMINISDYINRWIFVTITNN |
| | | RLNNSKIYINGRLIDQKPISNLGNIHASNN |
| | | IMFKLDGCRDTHRYIWIKYFNLFDKELNEK |
| | | EIKDLYDNQSNSGILKDFWGDYLQYDKPYY |
| | | MLNLYDPNKYVDVNNVGIRGYMYLKGPRGS |
| | | VMTTNIYLNSSLYIGTKFIIKKYASGNKDN |
| | | IVRNNDRVYINVVVKNKEYRLATNASQAGV |
| | | EKILSALEIPDVGNLSQVVVMKSKNDQGIT |
| | | NKCKMNLQDNNGNDIGFIGFHQFNNIAKLV |
| | | ASNWYNRQIERSSRTLGCSWEFIPVDDGWG |
| | | ERPL |
| 72 | H_{c}-BoNT/ | IINTSILNLRYESNHLIDLSRYASKINIGS |
| | A1- | KVNFDPIDKNQIQLFNLESSKIEVILKNAI |
| | T1232R (of | VYNSMYENFSTSFWIRIPKYFNSISLNNEY |
| | full length) | TIINCMENNSGWKVSLNYGEIIWTLQDTQE |
| | | IKQRVVFKYSQMINISDYINRWIFVTITNN |
| | | RLNNSKIYINGRLIDQKPISNLGNIHASNN |
| | | IMFKLDGCRDTHRYIWIKYFNLFDKELNEK |
| | | EIKDLYDNQSNSGILKDFWGDYLQYDKPYY |
| | | MLNLYDPNKYVDVNNVGIRGYMYLKGPRGS |
| | | VMTTNIYLNSSLYRGTKFIIKKYASGNKDN |
| | | IVRNNDRVYINVVVKNKEYRLATNASQAGV |
| | | EKILSALEIPDVGNLSQVVVMKSKNDQGIR |
| | | NKCKMNLQDNNGNDIGFIGFHQFNNIAKLV |
| | | ASNWYNRQIERSSRTLGCSWEFIPVDDGWG |
| | | ERPL |
| 73 | H_{c}-BoNT/ | IINTSILNLRYESNHLIDLSRYASKINIGS |
| | A1- | KVNFDPIDKNQIQLFNLESSKIEVILKNAI |
| | T1232K (of | VYNSMYENFSTSFWIRIPKYFNSISLNNEY |
| | full length) | TIINCMENNSGWKVSLNYGEIIWTLQDTQE |
| | | IKQRVVFKYSQMINISDYINRWIFVTITNN |
| | | RLNNSKIYINGRLIDQKPISNLGNIHASNN |
| | | IMFKLDGCRDTHRYIWIKYFNLFDKELNEK |
| | | EIKDLYDNQSNSGILKDFWGDYLQYDKPYY |
| | | MLNLYDPNKYVDVNNVGIRGYMYLKGPRGS |
| | | VMTTNIYLNSSLYRGTKFIIKKYASGNKDN |
| | | IVRNNDRVYINVVVKNKEYRLATNASQAGV |
| | | EKILSALEIPDVGNLSQVVVMKSKNDQGIK |
| | | NKCKMNLQDNNGNDIGFIGFHQFNNIAKLV |
| | | ASNWYNRQIERSSRTLGCSWEFIPVDDGWG |
| | | ERPL |
| 74 | H_{c}-BoNT/ | IINTSILNLRYESNHLIDLSRYASKINIGS |
| | A1- | KVNFDPIDKNQIQLFNLESSKIEVILKNAI |
| | E1272G (of | VYNSMYENFSTSFWIRIPKYFNSISLNNEY |
| | full length) | TIINCMENNSGWKVSLNYGEIIWTLQDTQE |
| | | IKQRVVFKYSQMINISDYINRWIFVTITNN |
| | | RLNNSKIYINGRLIDQKPISNLGNIHASNN |
| | | IMFKLDGCRDTHRYIWIKYFNLFDKELNEK |
| | | EIKDLYDNQSNSGILKDFWGDYLQYDKPYY |
| | | MLNLYDPNKYVDVNNVGIRGYMYLKGPRGS |
| | | VMTTNIYLNSSLYRGTKFIIKKYASGNKDN |
| | | IVRNNDRVYINVVVKNKEYRLATNASQAGV |
| | | EKILSALEIPDVGNLSQVVVMKSKNDQGIT |
| | | NKCKMNLQDNNGNDIGFIGFHQFNNIAKLV |
| | | ASNWYNRQIGRSSRTLGCSWEFIPVDDGWG |
| | | ERPL |
| 75 | H_{c}-BoNT/ | IINTSILNLRYESNHLIDLSRYASKINIGS |
| | A1- | KVNFDPIDKNQIQLFNLESSKIEVILKNAI |
| | L1278F (of | VYNSMYENFSTSFWIRIPKYFNSISLNNEY |
| | full length) | TIINCMENNSGWKVSLNYGEIIWTLQDTQE |
| | | IKQRVVFKYSQMINISDYINRWIFVTITNN |
| | | RLNNSKIYINGRLIDQKPISNLGNIHASNN |
| | | IMFKLDGCRDTHRYIWIKYFNLFDKELNEK |
| | | EIKDLYDNQSNSGILKDFWGDYLQYDKPYY |
| | | MLNLYDPNKYVDVNNVGIRGYMYLKGPRGS |
| | | VMTTNIYLNSSLYRGTKFIIKKYASGNKDN |
| | | IVRNNDRVYINVVVKNKEYRLATNASQAGV |
| | | EKILSALEIPDVGNLSQVVVMKSKNDQGIT |
| | | NKCKMNLQDNNGNDIGFIGFHQFNNIAKLV |
| | | ASNWYNRQIERSSRTFGCSWEFIPVDDGWG |
| | | ERPL |
| 76 | H_{c}-BoNT/ | IINTSILNLRYESNHLIDLSRYASKINIGS |
| | A1- | KVNFDPIDKNQIQLFNLESSKIEVILKNAI |
| | L1278Y (of | VYNSMYENFSTSFWIRIPKYFNSISLNNEY |
| | full length) | TIINCMENNSGWKVSLNYGEIIWTLQDTQE |
| | | IKQRVVFKYSQMINISDYINRWIFVTITNN |
| | | RLNNSKIYINGRLIDQKPISNLGNIHASNN |
| | | IMFKLDGCRDTHRYIWIKYFNLFDKELNEK |
| | | EIKDLYDNQSNSGILKDFWGDYLQYDKPYY |
| | | MLNLYDPNKYVDVNNVGIRGYMYLKGPRGS |
| | | VMTTNIYLNSSLYRGTKFIIKKYASGNKDN |
| | | IVRNNDRVYINVVVKNKEYRLATNASQAGV |
| | | EKILSALEIPDVGNLSQVVVMKSKNDQGIT |
| | | NKCKMNLQDNNGNDIGFIGFHQFNNIAKLV |
| | | ASNWYNRQIERSSRTYGCSWEFIPVDDGWG |
| | | ERPL |
| 77 | H_{c}-BoNT/ | IINTSILNLRYESNHLIDLSRYASKINIGS |
| | A1- | KVNFDPIDKNQIQLFNLESSKIEVILKNAI |
| | L1278W (of | VYNSMYENFSTSFWIRIPKYFNSISLNNEY |
| | full length) | TIINCMENNSGWKVSLNYGEIIWTLQDTQE |
| | | IKQRVVFKYSQMINISDYINRWIFVTITNN |
| | | RLNNSKIYINGRLIDQKPISNLGNIHASNN |
| | | IMFKLDGCRDTHRYIWIKYFNLFDKELNEK |
| | | EIKDLYDNQSNSGILKDFWGDYLQYDKPYY |
| | | MLNLYDPNKYVDVNNVGIRGYMYLKGPRGS |
| | | VMTTNIYLNSSLYRGTKFIIKKYASGNKDN |
| | | IVRNNDRVYINVVVKNKEYRLATNASQAGV |
| | | EKILSALEIPDVGNLSQVVVMKSKNDQGIT |
| | | NKCKMNLQDNNGNDIGFIGFHQFNNIAKLV |
| | | ASNWYNRQIERSSRTWGCSWEFIPVDDGWG |
| | | ERPL |
| 78 | H_{c}-BoNT/ | IINTSILNLRYESNHLIDLSRYASKINIGS |
| | A1- | KVNFDPIDKNQIQLFNLESSKIEVILKNAI |
| | D1288E (of | VYNSMYENFSTSFWIRIPKYFNSISLNNEY |
| | full length) | TIINCMENNSGWKVSLNYGEIIWTLQDTQE |
| | | IKQRVVFKYSQMINISDYINRWIFVTITNN |
| | | RLNNSKIYINGRLIDQKPISNLGNIHASNN |
| | | IMFKLDGCRDTHRYIWIKYFNLFDKELNEK |
| | | EIKDLYDNQSNSGILKDFWGDYLQYDKPYY |
| | | MLNLYDPNKYVDVNNVGIRGYMYLKGPRGS |
| | | VMTTNIYLNSSLYRGTKFIIKKYASGNKDN |
| | | IVRNNDRVYINVVVKNKEYRLATNASQAGV |
| | | EKILSALEIPDVGNLSQVVVMKSKNDQGIT |
| | | NKCKMNLQDNNGNDIGFIGFHQFNNIAKLV |
| | | ASNWYNRQIERSSRTLGCSWEFIPVEDGWG |
| | | ERPL |
| 79 | H_{c}-BoNT/ | IINTSILNLRYESNHLIDLSRYASKINIGS |
| | A1- | KVNFDPIDKNQIQLFNLESSKIEVILKNAI |
| | D1289Y (of | VYNSMYENFSTSFWIRIPKYFNSISLNNEY |
| | full length) | TIINCMENNSGWKVSLNYGEIIWTLQDTQE |
| | | IKQRVVFKYSQMINISDYINRWIFVTITNN |
| | | RLNNSKIYINGRLIDQKPISNLGNIHASNN |
| | | IMFKLDGCRDTHRYIWIKYFNLFDKELNEK |
| | | EIKDLYDNQSNSGILKDFWGDYLQYDKPYY |
| | | MLNLYDPNKYVDVNNVGIRGYMYLKGPRGS |
| | | VMTTNIYLNSSLYRGTKFIIKKYASGNKDN |
| | | IVRNNDRVYINVVVKNKEYRLATNASQAGV |
| | | EKILSALEIPDVGNLSQVVVMKSKNDQGIT |
| | | NKCKMNLQDNNGNDIGFIGFHQFNNIAKLV |
| | | ASNWYNRQIERSSRTLGCSWEFIPVDYGWG |
| | | ERPL |
| 80 | H_{c}-BoNT/ | IINTSILNLRYESNHLIDLSRYASKINIGS |
| | A1- | KVNFDPIDKNQIQLFNLESSKIEVILKNAI |
| | G1292R (of | VYNSMYENFSTSFWIRIPKYFNSISLNNEY |
| | full length) | TIINCMENNSGWKVSLNYGEIIWTLQDTQE |
| | | IKQRVVFKYSQMINISDYINRWIFVTITNN |
| | | RLNNSKIYINGRLIDQKPISNLGNIHASNN |
| | | IMFKLDGCRDTHRYIWIKYFNLFDKELNEK |
| | | EIKDLYDNQSNSGILKDFWGDYLQYDKPYY |
| | | MLNLYDPNKYVDVNNVGIRGYMYLKGPRGS |
| | | VMTTNIYLNSSLYRGTKFIIKKYASGNKDN |
| | | IVRNNDRVYINVVVKNKEYRLATNASQAGV |
| | | EKILSALEIPDVGNLSQVVVMKSKNDQGIT |
| | | NKCKMNLQDNNGNDIGFIGFHQFNNIAKLV |
| | | ASNWYNRQIERSSRTLGCSWEFIPVDDGWR |
| | | ERPL |
| 81 | H_{c}-BoNT/ | IINTSILNLRYESNHLIDLSRYASKINIGS |
| | A1- | KVNFDPIDKNQIQLFNLESSKIEVILKNAI |
| | G1292K (of | VYNSMYENFSTSFWIRIPKYFNSISLNNEY |
| | full length) | TIINCMENNSGWKVSLNYGEIIWTLQDTQE |
| | | IKQRVVFKYSQMINISDYINRWIFVTITNN |
| | | RLNNSKIYINGRLIDQKPISNLGNIHASNN |
| | | IMFKLDGCRDTHRYIWIKYFNLFDKELNEK |
| | | EIKDLYDNQSNSGILKDFWGDYLQYDKPYY |
| | | MLNLYDPNKYVDVNNVGIRGYMYLKGPRGS |
| | | VMTTNIYLNSSLYRGTKFIIKKYASGNKDN |
| | | IVRNNDRVYINVVVKNKEYRLATNASQAGV |
| | | EKILSALEIPDVGNLSQVVVMKSKNDQGIT |
| | | NKCKMNLQDNNGNDIGFIGFHQFNNIAKLV |
| | | ASNWYNRQIERSSRTLGCSWEFIPVDDGWK |
| | | ERPL |
| 82 | H_{c}-BoNT/ | IINTSILNLRYESNHLIDLSRYASKINIGS |
| | A1- | KVNFDPIDKNQIQLFNLESSKIEVILKNAI |
| | R1294S (of | VYNSMYENFSTSFWIRIPKYFNSISLNNEY |
| | full length) | TIINCMENNSGWKVSLNYGEIIWTLQDTQE |
| | | IKQRVVFKYSQMINISDYINRWIFVTITNN |
| | | RLNNSKIYINGRLIDQKPISNLGNIHASNN |
| | | IMFKLDGCRDTHRYIWIKYFNLFDKELNEK |
| | | EIKDLYDNQSNSGILKDFWGDYLQYDKPYY |
| | | MLNLYDPNKYVDVNNVGIRGYMYLKGPRGS |
| | | VMTTNIYLNSSLYRGTKFIIKKYASGNKDN |
| | | IVRNNDRVYINVVVKNKEYRLATNASQAGV |
| | | EKILSALEIPDVGNLSQVVVMKSKNDQGIT |
| | | NKCKMNLQDNNGNDIGFIGFHQFNNIAKLV |
| | | ASNWYNRQIERSSRTLGCSWEFIPVDDGWG |
| | | ESPL |
| 83 | H_{c}-BoNT/ | IINTSILNLRYESNHLIDLSRYASKINIGS |
| | A1- | KVNFDPIDKNQIQLFNLESSKIEVILKNAI |
| | R1294T (of | VYNSMYENFSTSFWIRIPKYFNSISLNNEY |
| | full length) | TIINCMENNSGWKVSLNYGEIIWTLQDTQE |
| | | IKQRVVFKYSQMINISDYINRWIFVTITNN |
| | | RLNNSKIYINGRLIDQKPISNLGNIHASNN |
| | | IMFKLDGCRDTHRYIWIKYFNLFDKELNEK |
| | | EIKDLYDNQSNSGILKDFWGDYLQYDKPYY |
| | | MLNLYDPNKYVDVNNVGIRGYMYLKGPRGS |
| | | VMTTNIYLNSSLYRGTKFIIKKYASGNKDN |
| | | IVRNNDRVYINVVVKNKEYRLATNASQAGV |
| | | EKILSALEIPDVGNLSQVVVMKSKNDQGIT |
| | | NKCKMNLQDNNGNDIGFIGFHQFNNIAKLV |
| | | ASNWYNRQIERSSRTLGCSWEFIPVDDGWG |
| | | ETPL |
| 84 | H_{c}-BoNT/ | IINTSILNLRYESNHLIDLSRYASKINIGS |
| | A1- | KVNFDPIDKNQIQLFNLESSKIEVILKNAI |
| | P1295S (of | VYNSMYENFSTSFWIRIPKYFNSISLNNEY |
| | full length) | TIINCMENNSGWKVSLNYGEIIWTLQDTQE |
| | | IKQRVVFKYSQMINISDYINRWIFVTITNN |
| | | RLNNSKIYINGRLIDQKPISNLGNIHASNN |
| | | IMFKLDGCRDTHRYIWIKYFNLFDKELNEK |
| | | EIKDLYDNQSNSGILKDFWGDYLQYDKPYY |
| | | MLNLYDPNKYVDVNNVGIRGYMYLKGPRGS |
| | | VMTTNIYLNSSLYRGTKFIIKKYASGNKDN |
| | | IVRNNDRVYINVVVKNKEYRLATNASQAGV |
| | | EKILSALEIPDVGNLSQVVVMKSKNDQGIT |
| | | NKCKMNLQDNNGNDIGFIGFHQFNNIAKLV |
| | | ASNWYNRQIERSSRTLGCSWEFIPVDDGWG |
| | | ERSL |
| 85 | H_{c}-BoNT/ | IINTSILNLRYESNHLIDLSRYASKINIGS |
| | A1- | KVNFDPIDKNQIQLFNLESSKIEVILKNAI |
| | P1295T (of | VYNSMYENFSTSFWIRIPKYFNSISLNNEY |
| | full length) | TIINCMENNSGWKVSLNYGEIIWTLQDTQE |
| | | IKQRVVFKYSQMINISDYINRWIFVTITNN |
| | | RLNNSKIYINGRLIDQKPISNLGNIHASNN |
| | | IMFKLDGCRDTHRYIWIKYFNLFDKELNEK |
| | | EIKDLYDNQSNSGILKDFWGDYLQYDKPYY |
| | | MLNLYDPNKYVDVNNVGIRGYMYLKGPRGS |
| | | VMTTNIYLNSSLYRGTKFIIKKYASGNKDN |
| | | IVRNNDRVYINVVVKNKEYRLATNASQAGV |
| | | EKILSALEIPDVGNLSQVVVMKSKNDQGIT |
| | | NKCKMNLQDNNGNDIGFIGFHQFNNIAKLV |
| | | ASNWYNRQIERSSRTLGCSWEFIPVDDGWG |
| | | ERTL |
| 86 | H_{c}-BoNT/ | IVNTSILSIVYKKDDLIDLSRYGAKINIGD |
| | A2- | RVYYDSIDKNQIQLINLESSTIEVILKNAI |
| | K915Q (of | VYNSMYENFSTSFWIKIPKYFSKINLNNEY |
| | full length) | TIINCIENNSGWKVSLNYGEIIWTLQDNKQ |
| | | NIQRVVFKYSQMVNISDYINRWIFVTITNN |
| | | RLTKSKIYINGRLIDQKPISNLGNIHASNK |
| | | IMFKLDGCRDPRRYIMIKYFNLFDKELNEK |
| | | EIKDLYDSQSNSGILKDFWGNYLQYDKPYY |
| | | MLNLFDPNKYVDVNNIGIRGYMYLKGPRGS |
| | | VVTTNIYLNSTLYEGTKFIIKKYASGNEDN |
| | | IVRNNDRVYINVVVKNKEYRLATNASQAGV |
| | | EKILSALEIPDVGNLSQVVVMKSKDDQGIR |
| | | NKCKMNLQDNNGNDIGFIGFHLYDNIAKLV |
| | | ASNWYNRQVGKASRTFGCSWEFIPVDDGWG |
| | | ESSL |
| 87 | H_{c}-BoNT/ | IVNTSILSIVYKKDDLIDLSRYGAKINIGD |
| | A2- | RVYYDSIDKNQIKLINLESSKIEVILKNAI |
| | T923K (of full | VYNSMYENFSTSFWIKIPKYFSKINLNNEY |
| | length) | TIINCIENNSGWKVSLNYGEIIWTLQDNKQ |
| | | NIQRVVFKYSQMVNISDYINRWIFVTITNN |
| | | RLTKSKIYINGRLIDQKPISNLGNIHASNK |
| | | IMFKLDGCRDPRRYIMIKYFNLFDKELNEK |
| | | EIKDLYDSQSNSGILKDFWGNYLQYDKPYY |
| | | MLNLFDPNKYVDVNNIGIRGYMYLKGPRGS |
| | | VVTTNIYLNSTLYEGTKFIIKKYASGNEDN |
| | | IVRNNDRVYINVVVKNKEYRLATNASQAGV |
| | | EKILSALEIPDVGNLSQVVVMKSKDDQGIR |
| | | NKCKMNLQDNNGNDIGFIGFHLYDNIAKLV |
| | | ASNWYNRQVGKASRTFGCSWEFIPVDDGWG |
| | | ESSL |
| 88 | H_{c}-BoNT/ | IVNTSILSIVYKKDDLIDLSRYGAKINIGD |
| | A2- | RVYYDSIDKNQIKLINLESSTIEVILKNAI |
| | S1090N (of | VYNSMYENFSTSFWIKIPKYFSKINLNNEY |
| | full length) | TIINCIENNSGWKVSLNYGEIIWTLQDNKQ |
| | | NIQRVVFKYSQMVNISDYINRWIFVTITNN |
| | | RLTKSKIYINGRLIDQKPISNLGNIHASNK |
| | | IMFKLDGCRDPRRYIMIKYFNLFDKELNEK |
| | | EIKDLYDNQSNSGILKDFWGNYLQYDKPYY |
| | | MLNLFDPNKYVDVNNIGIRGYMYLKGPRGS |
| | | VVTTNIYLNSTLYEGTKFIIKKYASGNEDN |
| | | IVRNNDRVYINVVVKNKEYRLATNASQAGV |
| | | EKILSALEIPDVGNLSQVVVMKSKDDQGIR |
| | | NKCKMNLQDNNGNDIGFIGFHLYDNIAKLV |
| | | ASNWYNRQVGKASRTFGCSWEFIPVDDGWG |
| | | ESSL |
| 89 | H_{c}-BoNT/ | IVNTSILSIVYKKDDLIDLSRYGAKINIGD |
| | A2- | RVYYDSIDKNQIKLINLESSTIEVILKNAI |
| | N1103D (of | VYNSMYENFSTSFWIKIPKYFSKINLNNEY |
| | full length) | TIINCIENNSGWKVSLNYGEIIWTLQDNKQ |
| | | NIQRVVFKYSQMVNISDYINRWIFVTITNN |
| | | RLTKSKIYINGRLIDQKPISNLGNIHASNK |
| | | IMFKLDGCRDPRRYIMIKYFNLFDKELNEK |
| | | EIKDLYDSQSNSGILKDFWGDYLQYDKPYY |
| | | MLNLFDPNKYVDVNNIGIRGYMYLKGPRGS |
| | | VVTTNIYLNSTLYEGTKFIIKKYASGNEDN |
| | | IVRNNDRVYINVVVKNKEYRLATNASQAGV |
| | | EKILSALEIPDVGNLSQVVVMKSKDDQGIR |
| | | NKCKMNLQDNNGNDIGFIGFHLYDNIAKLV |
| | | ASNWYNRQVGKASRTFGCSWEFIPVDDGWG |
| | | ESSL |
| 90 | H_{c}-BoNT/ | IVNTSILSIVYKKDDLIDLSRYGAKINIGD |
| | A2- | RVYYDSIDKNQIKLINLESSTIEVILKNAI |
| | F1117Y (of | VYNSMYENFSTSFWIKIPKYFSKINLNNEY |
| | full length) | TIINCIENNSGWKVSLNYGEIIWTLQDNKQ |
| | | NIQRVVFKYSQMVNISDYINRWIFVTITNN |
| | | RLTKSKIYINGRLIDQKPISNLGNIHASNK |
| | | IMFKLDGCRDPRRYIMIKYFNLFDKELNEK |
| | | EIKDLYDSQSNSGILKDFWGNYLQYDKPYY |
| | | MLNLYDPNKYVDVNNIGIRGYMYLKGPRGS |
| | | VVTTNIYLNSTLYEGTKFIIKKYASGNEDN |
| | | IVRNNDRVYINVVVKNKEYRLATNASQAGV |
| | | EKILSALEIPDVGNLSQVVVMKSKDDQGIR |
| | | NKCKMNLQDNNGNDIGFIGFHLYDNIAKLV |
| | | ASNWYNRQVGKASRTFGCSWEFIPVDDGWG |
| | | ESSL |
| 91 | H_{c}-BoNT/ | IVNTSILSIVYKKDDLIDLSRYGAKINIGD |
| | A2- | RVYYDSIDKNQIKLINLESSTIEVILKNAI |
| | E1156M (of | VYNSMYENFSTSFWIKIPKYFSKINLNNEY |
| | full length) | TIINCIENNSGWKVSLNYGEIIWTLQDNKQ |
| | | NIQRVVFKYSQMVNISDYINRWIFVTITNN |
| | | RLTKSKIYINGRLIDQKPISNLGNIHASNK |
| | | IMFKLDGCRDPRRYIMIKYFNLFDKELNEK |
| | | EIKDLYDSQSNSGILKDFWGNYLQYDKPYY |
| | | MLNLFDPNKYVDVNNIGIRGYMYLKGPRGS |
| | | VVTTNIYLNSTLYMGTKFIIKKYASGNEDN |
| | | IVRNNDRVYINVVVKNKEYRLATNASQAGV |
| | | EKILSALEIPDVGNLSQVVVMKSKDDQGIR |
| | | NKCKMNLQDNNGNDIGFIGFHLYDNIAKLV |
| | | ASNWYNRQVGKASRTFGCSWEFIPVDDGWG |
| | | ESSL |
| 92 | H_{c}-BoNT/ | IVNTSILSIVYKKDDLIDLSRYGAKINIGD |
| | A2- | RVYYDSIDKNQIKLINLESSTIEVILKNAI |
| | E1170K (of | VYNSMYENFSTSFWIKIPKYFSKINLNNEY |
| | full length) | TIINCIENNSGWKVSLNYGEIIWTLQDNKQ |
| | | NIQRVVFKYSQMVNISDYINRWIFVTITNN |
| | | RLTKSKIYINGRLIDQKPISNLGNIHASNK |
| | | IMFKLDGCRDPRRYIMIKYFNLFDKELNEK |
| | | EIKDLYDSQSNSGILKDFWGNYLQYDKPYY |
| | | MLNLFDPNKYVDVNNIGIRGYMYLKGPRGS |
| | | VVTTNIYLNSTLYEGTKFIIKKYASGNKDN |
| | | IVRNNDRVYINVVVKNKEYRLATNASQAGV |
| | | EKILSALEIPDVGNLSQVVVMKSKDDQGIR |
| | | NKCKMNLQDNNGNDIGFIGFHLYDNIAKLV |
| | | ASNWYNRQVGKASRTFGCSWEFIPVDDGWG |
| | | ESSL |
| 93 | H_{c}-BoNT/ | IVNTSILSIVYKKDDLIDLSRYGAKINIGD |
| | A2- | RVYYDSIDKNQIKLINLESSTIEVILKNAI |
| | D1227N (of | VYNSMYENFSTSFWIKIPKYFSKINLNNEY |
| | full length) | TIINCIENNSGWKVSLNYGEIIWTLQDNKQ |
| | | NIQRVVFKYSQMVNISDYINRWIFVTITNN |
| | | RLTKSKIYINGRLIDQKPISNLGNIHASNK |
| | | IMFKLDGCRDPRRYIMIKYFNLFDKELNEK |
| | | EIKDLYDSQSNSGILKDFWGNYLQYDKPYY |
| | | MLNLFDPNKYVDVNNIGIRGYMYLKGPRGS |
| | | VVTTNIYLNSTLYEGTKFIIKKYASGNEDN |
| | | IVRNNDRVYINVVVKNKEYRLATNASQAGV |
| | | EKILSALEIPDVGNLSQVVVMKSKNDQGIR |
| | | NKCKMNLQDNNGNDIGFIGFHLYDNIAKLV |
| | | ASNWYNRQVGKASRTFGCSWEFIPVDDGWG |
| | | ESSL |
| 94 | H_{c}-BoNT/ | IVNTSILSIVYKKDDLIDLSRYGAKINIGD |
| | A2- | RVYYDSIDKNQIKLINLESSTIEVILKNAI |
| | L1254Q (of | VYNSMYENFSTSFWIKIPKYFSKINLNNEY |
| | full length) | TIINCIENNSGWKVSLNYGEIIWTLQDNKQ |
| | | NIQRVVFKYSQMVNISDYINRWIFVTITNN |
| | | RLTKSKIYINGRLIDQKPISNLGNIHASNK |
| | | IMFKLDGCRDPRRYIMIKYFNLFDKELNEK |
| | | EIKDLYDSQSNSGILKDFWGNYLQYDKPYY |
| | | MLNLFDPNKYVDVNNIGIRGYMYLKGPRGS |
| | | VVTTNIYLNSTLYEGTKFIIKKYASGNEDN |
| | | IVRNNDRVYINVVVKNKEYRLATNASQAGV |
| | | EKILSALEIPDVGNLSQVVVMKSKDDQGIR |
| | | NKCKMNLQDNNGNDIGFIGFHQYDNIAKLV |
| | | ASNWYNRQVGKASRTFGCSWEFIPVDDGWG |
| | | ESSL |
| 95 | H_{c}-BoNT/ | IVNTSILSIVYKKDDLIDLSRYGAKINIGD |
| | A2- | RVYYDSIDKNQIKLINLESSTIEVILKNAI |
| | Y1255F (of | VYNSMYENFSTSFWIKIPKYFSKINLNNEY |
| | full length) | TIINCIENNSGWKVSLNYGEIIWTLQDNKQ |
| | | NIQRVVFKYSQMVNISDYINRWIFVTITNN |
| | | RLTKSKIYINGRLIDQKPISNLGNIHASNK |
| | | IMFKLDGCRDPRRYIMIKYFNLFDKELNEK |
| | | EIKDLYDSQSNSGILKDFWGNYLQYDKPYY |
| | | MLNLFDPNKYVDVNNIGIRGYMYLKGPRGS |
| | | VVTTNIYLNSTLYEGTKFIIKKYASGNEDN |
| | | IVRNNDRVYINVVVKNKEYRLATNASQAGV |
| | | EKILSALEIPDVGNLSQVVVMKSKDDQGIR |
| | | NKCKMNLQDNNGNDIGFIGFHLFDNIAKLV |
| | | ASNWYNRQVGKASRTFGCSWEFIPVDDGWG |
| | | ESSL |
| 96 | H_{c}-BoNT/ | IVNTSILSIVYKKDDLIDLSRYGAKINIGD |
| | A2- | RVYYDSIDKNQIKLINLESSTIEVILKNAI |
| | D1256N (of | VYNSMYENFSTSFWIKIPKYFSKINLNNEY |
| | full length) | TIINCIENNSGWKVSLNYGEIIWTLQDNKQ |
| | | NIQRVVFKYSQMVNISDYINRWIFVTITNN |
| | | RLTKSKIYINGRLIDQKPISNLGNIHASNK |
| | | IMFKLDGCRDPRRYIMIKYFNLFDKELNEK |
| | | EIKDLYDSQSNSGILKDFWGNYLQYDKPYY |
| | | MLNLFDPNKYVDVNNIGIRGYMYLKGPRGS |
| | | VVTTNIYLNSTLYEGTKFIIKKYASGNEDN |
| | | IVRNNDRVYINVVVKNKEYRLATNASQAGV |
| | | EKILSALEIPDVGNLSQVVVMKSKDDQGIR |
| | | NKCKMNLQDNNGNDIGFIGFHLYNNIAKLV |
| | | ASNWYNRQVGKASRTFGCSWEFIPVDDGWG |
| | | ESSL |
| 97 | BoNT/ | MPVTINNFNYNDPIDNNNIIMMEPPFARGT |
| | B | GRYYKAFKITDRIWIIPERYTFGYKPEDFN |
| | protease and | KSSGIFNRDVCEYYDPDYLNTNDKKNIFLQ |
| | translocation | TMIKLFNRIKSKPLGEKLLEMIINGIPYLG |
| | domain (AA | DRRVPLEEFNTNIASVTVNKLISNPGEVER |
| | 1-857) | KKGIFANLIIFGPGPVLNENETIDIGIQNH |
| | | FASREGFGGIMQMKFCPEYVSVFNNVQENK |
| | | GASIFNRRGYFSDPALILMHELIHVLHGLY |
| | | GIKVDDLPIVPNEKKFFMQSTDAIQAEELY |
| | | TFGGQDPSIITPSTDKSIYDKVLQNFRGIV |
| | | DRLNKVLVCISDPNININIYKNKFKDKYKF |
| | | VEDSEGKYSIDVESFDKLYKSLMFGFTETN |
| | | IAENYKIKTRASYFSDSLPPVKIKNLLDNE |
| | | IYTIEEGFNISDKDMEKEYRGQNKAINKQA |
| | | YEEISKEHLAVYKIQMCKSVKAPGICIDVD |
| | | NEDLFFIADKNSFSDDLSKNERIEYNTQSN |
| | | YIENDFPINELILDTDLISKIELPSENTES |
| | | LTDFNVDVPVYEKQPAIKKIFTDENTIFQY |
| | | LYSQTFPLDIRDISLTSSFDDALLFSNKVY |
| | | SFFSMDYIKTANKVVEAGLFAGWVKQIVND |
| | | FVIEANKSNTMDKIADISLIVPYIGLALNV |
| | | GNETAKGNFENAFEIAGASILLEFIPELLI |
| | | PVVGAFLLESYIDNKNKIIKTIDNALTKRN |
| | | EKWSDMYGLIVAQWLSTVNTQFYTIKEGMY |
| | | KALNYQAQALEEIIKYRYNIYSEKEKSNIN |
| | | IDFNDINSKLNEGINQAIDNINNFINGCSV |
| | | SYLMKKMIPLAVEKLLDFDNTLKKNLLNYI |
| | | DENKLYLIGSAEYEKSKVNKYLKTIMPFDL |
| | | SIYTNDTILIEMFNKYN |
| 98 | BoNT/ | MPITINNFNYSDPVDNKNILYLDTHLNTLA |
| | C | NEPEKAFRITGNIWVIPDRFSRNSNPNLNK |
| | protease and | PPRVTSPKSGYYDPNYLSTDSDKDTFLKEI |
| | translocation | IKLFKRINSREIGEELIYRLSTDIPFPGNN |
| | domain | NTPINTFDFDVDFNSVDVKTRQGNNWVKTG |
| | (AA 1-870) | SINPSVIITGPRENIIDPETSTFKLTNNTF |
| | | AAQEGFGALSIISISPRFMLTYSNATNDVG |
| | | EGRFSKSEFCMDPILILMHELNHAMHNLYG |
| | | IAIPNDQTISSVTSNIFYSQYNVKLEYAEI |
| | | YAFGGPTIDLIPKSARKYFEEKALDYYRSI |
| | | AKRLNSITTANPSSFNKYIGEYKQKLIRKY |
| | | RFVVESSGEVTVNRNKFVELYNELTQIFTE |
| | | FNYAKIYNVQNRKIYLSNVYTPVTANILDD |
| | | NVYDIQNGFNIPKSNLNVLFMGQNLSRNPA |
| | | LRKVNPENMLYLFTKFCHKAIDGRSLYNKT |
| | | LDCRELLVKNTDLPFIGDISDVKTDIFLRK |
| | | DINEETEVIYYPDNVSVDQVILSKNTSEHG |
| | | QLDLLYPSIDSESEILPGENQVFYDNRTQN |
| | | VDYLNSYYYLESQKLSDNVEDFTFTRSIEE |
| | | ALDNSAKVYTYFPTLANKVNAGVQGGLFLM |
| | | WANDVVEDFTTNILRKDTLDKISDVSAIIP |
| | | YIGPALNISNSVRRGNFTEAFAVTGVTILL |
| | | EAFPEFTIPALGAFVIYSKVQERNEIIKTI |
| | | DNCLEQRIKRWKDSYEWMMGTWLSRIITQF |
| | | NNISYQMYDSLNYQAGAIKAKIDLEYKKYS |
| | | GSDKENIKSQVENLKNSLDVKISEAMNNIN |
| | | KFIRECSVTYLFKNMLPKVIDELNEFDRNT |
| | | KAKLINLIDSHNIILVGEVDKLKAKVNNSF |
| | | QNTIPFNIFSYTNNSLLKDIINEYFNNIND |
| 99 | BoNT/D | MTWPVKDFNYSDPVNDNDILYLRIPQNKLI |
| | protease and | TTPVKAFMITQNIWVIPERFSSDTNPSLSK |
| | translocation | PPRPTSKYQSYYDPSYLSTDEQKDTFLKGI |
| | domain | IKLFKRINERDIGKKLINYLVVGSPFMGDS |
| | (AA 1-862) | STPEDTFDFTRHTTNIAVEKFENGSWKVTN |
| | | IITPSVLIFGPLPNILDYTASLTLQGQQSN |
| | | PSFEGFGTLSILKVAPEFLLTFSDVTSNQS |
| | | SAVLGKSIFCMDPVIALMHELTHSLHQLYG |
| | | INIPSDKRIRPQVSEGFFSQDGPNVQFEEL |
| | | YTFGGLDVEIIPQIERSQLREKALGHYKDI |
| | | AKRLNNINKTIPSSWISNIDKYKKIFSEKY |
| | | NFDKDNTGNFVVNIDKFNSLYSDLTNVMSE |
| | | VVYSSQYNVKNRTHYFSRHYLPVFANILDD |
| | | NIYTIRDGFNLTNKGFNIENSGQNIERNPA |
| | | LQKLSSESVVDLFTKVCLRLTKNSRDDSTC |
| | | IKVKNNRLPYVADKDSISQEIFENKIITDE |
| | | TNVQNYSDNFSLDESILDGQVPINPEIVDP |
| | | LLPNVNMEPLNLPGEEIVFYDDITKYVDYL |
| | | NSYYYLESQKLSNNVENITLTTSVEEALGY |
| | | SNKIYTFLPSLAEKVNKGVQAGLFLNWANE |
| | | VVEDFTTNIMKKDTLDKISDVSVIIPYIGP |
| | | ALNIGNSALRGNFKQAFATAGVAFLLEGFP |
| | | EFTIPALGVFTFYSSIQEREKIIKTIENCL |
| | | EQRVKRWKDSYQWMVSNWLSRITTQFNHIN |
| | | YQMYDSLSYQADAIKAKIDLEYKKYSGSDK |
| | | ENIKSQVENLKNSLDVKISEAMNNINKFIR |
| | | ECSVTYLFKNMLPKVIDELNKFDLRTKTEL |
| | | INLIDSHNIILVGEVDRLKAKVNESFENTM |
| | | PFNIFSYTNNSLLKDIINEYFN |
| 100 | BoNT/ | MPKINSFNYNDPVNDRTILYIKPGGCQEFY |
| | E | KSFNIMKNIWIIPERNVIGTTPQDFHPPTS |
| | protease and | LKNGDSSYYDPNYLQSDEEKDRFLKIVTKI |
| | translocation | FNRINNNLSGGILLEELSKANPYLGNDNTP |
| | domain | DNQFHIGDASAVEIKFSNGSQDILLPNVII |
| | (AA 1-844) | MGAEPDLFETNSSNISLRNNYMPSNHRFGS |
| | | IAIVTFSPEYSFRFNDNCMNEFIQDPALTL |
| | | MHELIHSLHGLYGAKGITTKYTITQKQNPL |
| | | ITNIRGTNIEEFLTFGGTDLNIITSAQSND |
| | | IYTNLLADYKKIASKLSKVQVSNPLLNPYK |
| | | DVFEAKYGLDKDASGIYSVNINKFNDIFKK |
| | | LYSFTEFDLRTKFQVKCRQTYIGQYKYFKL |
| | | SNLLNDSIYNISEGYNINNLKVNFRGQNAN |
| | | LNPRIITPITGRGLVKKIIRFCKNIVSVKG |
| | | IRKSICIEINNGELFFVASENSYNDDNINT |
| | | PKEIDDTVTSNNNYENDLDQVILNFNSESA |
| | | PGLSDEKLNLTIQNDAYIPKYDSNGTSDIE |
| | | QHDVNELNVFFYLDAQKVPEGENNVNLTSS |
| | | IDTALLEQPKIYTFFSSEFINNVNKPVQAA |
| | | LFVSWIQQVLVDFTTEANQKSTVDKIADIS |
| | | IVVPYIGLALNIGNEAQKGNFKDALELLGA |
| | | GILLEFEPELLIPTILVFTIKSFLGSSDNK |
| | | NKVIKAINNALKERDEKWKEVYSFIVSNWM |
| | | TKINTQFNKRKEQMYQALQNQVNAIKTIIE |
| | | SKYNSYTLEEKNELTNKYDIKQIENELNQK |
| | | VSIAMNNIDRFLTESSISYLMKIINEVKIN |
| | | KLREYDENVKTYLLNYIIQHGSILGESQQE |
| | | LNSMVTDTLNNSIPFKLSSYTDDKILISYF |
| | | NKFF |
| 101 | BoNT/ | MPVVINSFNYNDPVNDDTILYMQIPYEEKS |
| | F | KKYYKAFEIMRNVWIIPERNTIGTDPSDFD |
| | protease and | PPASLENGSSAYYDPNYLTTDAEKDRYLKT |
| | translocation | TIKLFKRINSNPAGEVLLQEISYAKPYLGN |
| | domain (1- | EHTPINEFHPVTRTTSVNIKSSTNVKSSII |
| | 863) | LNLLVLGAGPDIFENSSYPVRKLMDSGGVY |
| | | DPSNDGFGSINIVTFSPEYEYTFNDISGGY |
| | | NSSTESFIADPAISLAHELIHALHGLYGAR |
| | | GVTYKETIKVKQAPLMIAEKPIRLEEFLTF |
| | | GGQDLNIITSAMKEKIYNNLLANYEKIATR |
| | | LSRVNSAPPEYDINEYKDYFQWKYGLDKNA |
| | | DGSYTVNENKFNEIYKKLYSFTEIDLANKF |
| | | KVKCRNTYFIKYGFLKVPNLLDDDIYTVSE |
| | | GFNIGNLAVNNRGQNIKLNPKIIDSIPDKG |
| | | LVEKIVKFCKSVIPRKGTKAPPRLCIRVNN |
| | | RELFFVASESSYNENDINTPKEIDDTTNLN |
| | | NNYRNNLDEVILDYNSETIPQISNQTLNTL |
| | | VQDDSYVPRYDSNGTSEIEEHNVVDLNVFF |
| | | YLHAQKVPEGETNISLTSSIDTALSEESQV |
| | | YTFFSSEFINTINKPVHAALFISWINQVIR |
| | | DFTTEATQKSTFDKIADISLVVPYVGLALN |
| | | IGNEVQKENFKEAFELLGAGILLEFVPELL |
| | | IPTILVFTIKSFIGSSENKNKIIKAINNSL |
| | | MERETKWKEIYSWIVSNWLTRINTQFNKRK |
| | | EQMYQALQNQVDAIKTVIEYKYNNYTSDER |
| | | NRLESEYNINNIREELNKKVSLAMENIERF |
| | | ITESSIFYLMKLINEAKVSKLREYDEGVKE |
| | | YLLDYISEHRSILGNSVQELNDLVTSTLNN |
| | | SIPFELSSYTNDKILILYFNKLY |
| 102 | BoNT/ | MPVVINSFNYDDPVNDNTIIYIRPPYYETS |
| | H | NTYFKAFQIMDNVWIIPERYRLGIDPSLFN |
| | protease and | PPVSLKAGSDGYFDPNYLSTNTEKNKYLQI |
| | translocation | MIKLFKRINSKPAGQILLEEIKNAIPYLGN |
| | domain | SYTQEEQFTTNNRTVSFNVKLANGNIVQQM |
| | (AA 1-858) | ANLIIWGPGPDLTTNKTGGIIYSPYQSMEA |
| | | TPYKDGFGSIMTVEFSPEYATAFNDISIAS |
| | | HSPSLFIKDPALILMHELIHVLHGLYGTYI |
| | | TEYKITPNVVQSYMKVTKPITSAEFLTFGG |
| | | RDRNIVPQSIQSQLYNKVLSDYKRIASRLN |
| | | KVNTATALINIDEFKNLYEWKYQFAKDSNG |
| | | VYSVDLNKFEQLYKKIYSFTEFNLAYEFKI |
| | | KTRLGYLAENFGPFYLPNLLDDSIYTEVDG |
| | | FNIGALSINYQGQNIGSDINSIKKLQGQGV |
| | | VSRVVRLCSNSNTKNSLCITVNNRDLFFIA |
| | | SQESYGENTINTYKEIDDTTTLDPSFEDIL |
| | | DKVILNFNEQVIPQMPNRNVSTDIQKDNYI |
| | | PKYDYNRTDIIDSYEVGRNYNTFFYLNAQK |
| | | FSPNESNITLTSSFDTGLLEGSKVYTFFSS |
| | | DFINNINKPVQALLFIEWVKQVIRDFTTEA |
| | | TKTSTVDKLKDISLVVPYIGLALNIGDEIY |
| | | KQHFAEAVELVGAGLLLEFSPEFLIPTLLI |
| | | FTIKGYLTGSIRDKDKIIKTLDNALNVRDQ |
| | | KWKELYRWVVSKWLTTINTQFNKRKEQMYK |
| | | ALKNQATAIKKIIENKYNNYTTDEKSKIDS |
| | | SYNINEIERTLNEKINLAMKNIEQFITESS |
| | | IAYLINIINNETIQKLKSYDDLVRRYLLGY |
| | | IRNHSSILGNSVEELNSKVNNHLDNGIPFE |
| | | LSSYTNDSLLIRYFNKNY |
| 103 | BoNT/ | MKLEINKFNYNDPIDGINVITMRPPRHSDK |
| | X | INKGKGPFKAFQVIKNIWIVPERYNFTNNT |
| | protease and | NDLNIPSEPIMEADAIYNPNYLNTPSEKDE |
| | translocation | FLQGVIKVLERIKSKPEGEKLLELISSSIP |
| | domain | LPLVSNGALTLSDNETIAYQENNNIVSNLQ |
| | (AA 1-889) | ANLVIYGPGPDIANNATYGLYSTPISNGEG |
| | | TLSEVSFSPFYLKPFDESYGNYRSLVNIVN |
| | | KFVKREFAPDPASTLMHELVHVTHNLYGIS |
| | | NRNFYYNFDTGKIETSRQQNSLIFEELLTF |
| | | GGIDSKAISSLIIKKIIETAKNNYTTLISE |
| | | RLNTVTVENDLLKYIKNKIPVQGRLGNFKL |
| | | DTAEFEKKLNTILFVLNESNLAQRFSILVR |
| | | KHYLKERPIDPIYVNILDDNSYSTLEGFNI |
| | | SSQGSNDFQGQLLESSYFEKIESNALRAFI |
| | | KICPRNGLLYNAIYRNSKNYLNNIDLEDKK |
| | | TTSKTNVSYPCSLLNGCIEVENKDLFLISN |
| | | KDSLNDINLSEEKIKPETTVFFKDKLPPQD |
| | | ITLSNYDFTEANSIPSISQQNILERNEELY |
| | | EPIRNSLFEIKTIYVDKLTTFHFLEAQNID |
| | | ESIDSSKIRVELTDSVDEALSNPNKVYSPF |
| | | KNMSNTINSIETGITSTYIFYQ |
| | | WLRSIVKDFSDETGKIDVIDKSSDTLAIVP |
| | | YIGPLLNIGNDIRHGDFVGAIELAGITALL |
| | | EYVPEFTIPILVGLEVIGGELAREQVEAIV |
| | | NNALDKRDQKWAEVYNITKAQWWGTIHLQI |
| | | NTRLAHTYKALSRQANAIKMNMEFQLANYK |
| | | GNIDDKAKIKNAISETEILLNKSVEQAMKN |
| | | TEKFMIKLSNSYLTKEMIPKVQDNLKNFDL |
| | | ETKKTLDKFIKEKEDILGTNLSSSLRRKVS |
| | | IRLNKNIAFDINDIPFSEFDDLINQYK |
| 104 | BoNT/ | MVTINDLHYSDPIDEDNIINMRIPLYDLEV |
| | EN | DDQFINHNVPDLKAFQVFPNVWVVPERYTF |
| | protease and | YSTMKNLDAPANPSRSSYYDPTYLQSDAEK |
| | translocation | EVFLQQMILLFKRINSTQEGQQFLNLLSRS |
| | domain | IPVPYESNGDVAMGTTQVIKQMDDKGNVLK |
| | (1-874) | HRRAHIIIYGPGPDLMAKGSKALTKSRETG |
| | | RGCMAEIYFSPMYHKTYSTKLTNKNSLVDK |
| | | SVQEFVPDPAVTLIHELCHGLHALYGIDLG |
| | | NVGSWEFNSNPNSLFSSWFSSKEAVNFEEV |
| | | MTFGGEDVKVIKSEIDKKIPGILNLIKTTV |
| | | EPIINKITDPHDEMLQCLQSKYPSLKGTLG |
| | | QFFFDDTQLEKDIRDLWMVMNETMFAENLK |
| | | ALTRARYLVPKVENIVQVDILSPNVYTIDK |
| | | GFNHLSKGFKGQSVSQSYFRKISALARGAV |
| | | VRACPNPHFSSQRGLSSCIEILEDDLFIMS |
| | | SKDSFTDTDFSEPSVGPVSYKAKKGADTIL |
| | | DSTLSNYDFSKEINFTSTVPIITVEDPLET |
| | | DEDVPVISEDRTVYVDDYTTFHFLEAQKIG |
| | | KEVVPTQTKVVFTTNMEEALFDSKKVYTVF |
| | | ENTASRINEAGTGIANGMMFYQWLKGIVQD |
| | | FTEEATQKDTFDKISDVTMIVPYLGNILNI |
| | | GNDIRKGDFMGAVELGGVTILLEAIPELTL |
| | | PVLIGLTIIEDELEKEQVSQTVYNVLDKRD |
| | | EKWEEVYGFVKQQWWWMVHTQFETRILHAY |
| | | QALNHQVEAIKANMTYQLANYRGNQEDKEL |
| | | LEKAIDDTLQSLYYAVDQAMHNIKRFLIQS |
| | | SKSYLLNQMLPKTKEQLLAFDQQTLRNVND |
| | | FINKNQGVLGESLAKDLKKKVEKRLTSLPV |
| | | FNLEDLPISEFEDLIHSHEIDIQDSEVLNI |
| | | GVNN |
| 105 | BoNT/ | MPVNIKXFNYNDPINNDDIIMMEPFNDPGP |
| | G | GTYYKAFRIIDRIWIVPERFTYGFQPDQFN |
| | protease and | ASTGVFSKDVYEYYDPTYLKTDAEKDKFLK |
| | translocation | TMIKLFNRINSKPSGQRLLDMIVDAIPYLG |
| | domain | NASTPPDKFAANVANVSINKKIIQPGAEDQ |
| | (AA 1-862) | IKGLMTNLIIFGPGPVLSDNFTDSMIMNGH |
| | | SPISEGFGARMMIRFCPSCLNVFNNVQENK |
| | | DTSIFSRRAYFADPALTLMHELIHVLHGLY |
| | | GIKISNLPITPNTKEFFMQHSDPVQAEELY |
| | | TFGGHDPSVISPSTDMNIYNKALQNFQDIA |
| | | NRLNIVSSAQGSGIDISLYKQIYKNKYDFV |
| | | EDPNGKYSVDKDKFDKLYKALMFGFTETNL |
| | | AGEYGIKTRYSYFSEYLPPIKTEKLLDNTI |
| | | YTQNEGENIASKNLKTEFNGQNKAVNKEAY |
| | | EEISLEHLVIYRIAMCKPVMYKNTGKSEQC |
| | | IIVNNEDLFFIANKDSFSKDLAKAETIAYN |
| | | TQNNTIENNFSIDQLILDNDLSSGIDLPNE |
| | | NTEPFTNFDDIDIPVYIKQSALKKIFVDGD |
| | | SLFEYLHAQTFPSNIENLQLTNSLNDALRN |
| | | NNKVYTFFSTNLVEKANTVVGASLFVNWVK |
| | | GVIDDFTSESTQKSTIDKVSDVSIIIPYIG |
| | | PALNVGNETAKENFKNAFEIGGAAILMEFI |
| | | PELIVPIVGFFTLESYVGNKGHIIMTISNA |
| | | LKKRDQKWTDMYGLIVSQWLSTVNTQFYTI |
| | | KERMYNALNNQSQAIEKIIEDQYNRYSEED |
| | | KMNINIDFNDIDFKLNQSINLAINNIDDFI |
| | | NQCSISYLMNRMIPLAVKKLKDFDDNLKRD |
| | | LLEYIDTNELYLLDEVNILKSKVNRHLKDS |
| | | IPFDLSLYTKDTILIQVENNYI |
| 106 | BoNT/ | MPVTINNFNYNDPIDNNNIIMMEPPFARGT |
| | B-A1 | GRYYKAFKITDRIWIIPERYTFGYKPEDFN |
| | chimera | KSSGIFNRDVCEYYDPDYLNTNDKKNIFLQ |
| | (wildtype A1 | TMIKLFNRIKSKPLGEKLLEMIINGIPYLG |
| | receptor | DRRVPLEEFNTNIASVTVNKLISNPGEVER |
| | binding | KKGIFANLIIFGPGPVLNENETIDIGIQNH |
| | domain) | FASREGFGGIMQMKFCPEYVSVFNNVQENK |
| | | GASIFNRRGYFSDPALILMHELIHVLHGLY |
| | | GIKVDDLPIVPNEKKFFMQSTDAIQAEELY |
| | | TFGGQDPSIITPSTDKSIYDKVLQNFRGIV |
| | | DRLNKVLVCISDPNININIYKNKFKDKYKF |
| | | VEDSEGKYSIDVESFDKLYKSLMFGFTETN |
| | | IAENYKIKTRASYFSDSLPPVKIKNLLDNE |
| | | IYTIEEGFNISDKDMEKEYRGQNKAINKQA |
| | | YEEISKEHLAVYKIQMCKSVKAPGICIDVD |
| | | NEDLFFIADKNSFSDDLSKNERIEYNTQSN |
| | | YIENDFPINELILDTDLISKIELPSENTES |
| | | LTDFNVDVPVYEKQPAIKKIFTDENTIFQY |
| | | LYSQTFPLDIRDISLTSSFDDALLFSNKVY |
| | | SFFSMDYIKTANKVVEAGLFAGWVKQIVND |
| | | FVIEANKSNTMDKIADISLIVPYIGLALNV |
| | | GNETAKGNFENAFEIAGASILLEFIPELLI |
| | | PVVGAFLLESYIDNKNKIIKTIDNALTKRN |
| | | EKWSDMYGLIVAQWLSTVNTQFYTIKEGMY |
| | | KALNYQAQALEEIIKYRYNIYSEKEKSNIN |
| | | IDFNDINSKLNEGINQAIDNINNFINGCSV |
| | | SYLMKKMIPLAVEKLLDFDNTLKKNLLNYI |
| | | DENKLYLIGSAEYEKSKVNKYLKTIMPFDL |
| | | SIYTNDTILIEMFNKYNIINTSILNLRYES |
| | | NHLIDLSRYASKINIGSKVNFDPIDKNQIQ |
| | | LFNLESSKIEVILKNAIVYNSMYENFSTSF |
| | | WIRIPKYFNSISLNNEYTIINCMENNSGWK |
| | | VSLNYGEIIWTLQDTQEIKQRVVFKYSQMI |
| | | NISDYINRWIFVTITNNRLNNSKIYINGRL |
| | | IDQKPISNLGNIHASNNIMFKLDGCRDTHR |
| | | YIWIKYFNLFDKELNEKEIKDLYDNQSNSG |
| | | ILKDFWGDYLQYDKPYYMLNLYDPNKYVDV |
| | | NNVGIRGYMYLKGPRGSVMTTNIYLNSSLY |
| | | RGTKFIIKKYASGNKDNIVRNNDRVYINVV |
| | | VKNKEYRLATNASQAGVEKILSALEIPDVG |
| | | NLSQVVVMKSKNDQGITNKCKMNLQDNNGN |
| | | DIGFIGFHQFNNIAKLVASNWYNRQIERSS |
| | | RTLGCSWEFIPVDDGWGERPL |
| 107 | BoNT/ | MPITINNFNYSDPVDNKNILYLDTHLNTLA |
| | C-A1 | NEPEKAFRITGNIWVIPDRFSRNSNPNLNK |
| | chimera | PPRVTSPKSGYYDPNYLSTDSDKDTFLKEI |
| | (wildtype A1 | IKLFKRINSREIGEELIYRLSTDIPFPGNN |
| | receptor | NTPINTFDFDVDFNSVDVKTRQGNNWVKTG |
| | binding | SINPSVIITGPRENIIDPETSTFKLTNNTF |
| | domain) | AAQEGFGALSIISISPRFMLTYSNATNDVG |
| | | EGRFSKSEFCMDPILILMHELNHAMHNLYG |
| | | IAIPNDQTISSVTSNIFYSQYNVKLEYAEI |
| | | YAFGGPTIDLIPKSARKYFEEKALDYYRSI |
| | | AKRLNSITTANPSSFNKYIGEYKQKLIRKY |
| | | RFVVESSGEVTVNRNKFVELYNELTQIFTE |
| | | FNYAKIYNVQNRKIYLSNVYTPVTANILDD |
| | | NVYDIQNGFNIPKSNLNVLFMGQNLSRNPA |
| | | LRKVNPENMLYLFTKFCHKAIDGRSLYNKT |
| | | LDCRELLVKNTDLPFIGDISDVKTDIFLRK |
| | | DINEETEVIYYPDNVSVDQVILSKNTSEHG |
| | | QLDLLYPSIDSESEILPGENQVFYDNRTQN |
| | | VDYLNSYYYLESQKLSDNVEDFTFTRSIEE |
| | | ALDNSAKVYTYFPTLANKVNAGVQGGLFLM |
| | | WANDVVEDFTTNILRKDTLDKISDVSAIIP |
| | | YIGPALNISNSVRRGNFTEAFAVTGVTILL |
| | | EAFPEFTIPALGAFVIYSKVQERNEIIKTI |
| | | DNCLEQRIKRWKDSYEWMMGTWLSRIITQF |
| | | NNISYQMYDSLNYQAGAIKAKIDLEYKKYS |
| | | GSDKENIKSQVENLKNSLDVKISEAMNNIN |
| | | KFIRECSVTYLFKNMLPKVIDELNEFDRNT |
| | | KAKLINLIDSHNIILVGEVDKLKAKVNNSF |
| | | QNTIPFNIFSYTNNSLLKDIINEYFNNIND |
| | | IINTSILNLRYESNHLIDLSRYASKINIGS |
| | | KVNFDPIDKNQIQLFNLESSKIEVILKNAI |
| | | VYNSMYENFSTSFWIRIPKYFNSISLNNEY |
| | | TIINCMENNSGWKVSLNYGEIIWTLQDTQE |
| | | IKQRVVFKYSQMINISDYINRWIFVTITNN |
| | | RLNNSKIYINGRLIDQKPISNLGNIHASNN |
| | | IMFKLDGCRDTHRYIWIKYFNLFDKELNEK |
| | | EIKDLYDNQSNSGILKDFWGDYLQYDKPYY |
| | | MLNLYDPNKYVDVNNVGIRGYMYLKGPRGS |
| | | VMTTNIYLNSSLYRGTKFIIKKYASGNKDN |
| | | IVRNNDRVYINVVVKNKEYRLATNASQAGV |
| | | EKILSALEIPDVGNLSQVVVMKSKNDQGIT |
| | | NKCKMNLQDNNGNDIGFIGFHQFNNIAKLV |
| | | ASNWYNRQIERSSRTLGCSWEFIPVDDGWG |
| | | ERPL |
| 108 | | MTWPVKDFNYSDPVNDNDILYLRIPQNKLI |
| | BoNT/ | TTPVKAFMITQNIWVIPERFSSDTNPSLSK |
| | D-A1 | PPRPTSKYQSYYDPSYLSTDEQKDTFLKGI |
| | chimera | IKLFKRINERDIGKKLINYLVVGSPFMGDS |
| | (wildtype A1 | STPEDTFDFTRHTTNIAVEKFENGSWKVTN |
| | receptor | IITPSVLIFGPLPNILDYTASLTLQGQQSN |
| | binding | PSFEGFGTLSILKVAPEFLLTFSDVTSNQS |
| | domain) | SAVLGKSIFCMDPVIALMHELTHSLHQLYG |
| | | INIPSDKRIRPQVSEGFFSQDGPNVQFEEL |
| | | YTFGGLDVEIIPQIERSQLREKALGHYKDI |
| | | AKRLNNINKTIPSSWISNIDKYKKIFSEKY |
| | | NFDKDNTGNFVVNIDKFNSLYSDLTNVMSE |
| | | VVYSSQYNVKNRTHYFSRHYLPVFANILDD |
| | | NIYTIRDGFNLTNKGFNIENSGQNIERNPA |
| | | LQKLSSESVVDLFTKVCLRLTKNSRDDSTC |
| | | IKVKNNRLPYVADKDSISQEIFENKIITDE |
| | | TNVQNYSDNFSLDESILDGQVPINPEIVDP |
| | | LLPNVNMEPLNLPGEEIVFYDDITKYVDYL |
| | | NSYYYLESQKLSNNVENITLTTSVEEALGY |
| | | SNKIYTFLPSLAEKVNKGVQAGLFLNWANE |
| | | VVEDFTTNIMKKDTLDKISDVSVIIPYIGP |
| | | ALNIGNSALRGNFKQAFATAGVAFLLEGFP |
| | | EFTIPALGVFTFYSSIQEREKIIKTIENCL |
| | | EQRVKRWKDSYQWMVSNWLSRITTQFNHIN |
| | | YQMYDSLSYQADAIKAKIDLEYKKYSGSDK |
| | | ENIKSQVENLKNSLDVKISEAMNNINKFIR |
| | | ECSVTYLFKNMLPKVIDELNKFDLRTKTEL |
| | | INLIDSHNIILVGEVDRLKAKVNESFENTM |
| | | PFNIFSYTNNSLLKDIINEYFNIINTSILN |
| | | LRYESNHLIDLSRYASKINIGSKVNFDPID |
| | | KNQIQLFNLESSKIEVILKNAIVYNSMYEN |
| | | FSTSFWIRIPKYFNSISLNNEYTIINCMEN |
| | | NSGWKVSLNYGEIIWTLQDTQEIKQRVVFK |
| | | YSQMINISDYINRWIFVTITNNRLNNSKIY |
| | | INGRLIDQKPISNLGNIHASNNIMFKLDGC |
| | | RDTHRYIWIKYFNLFDKELNEKEIKDLYDN |
| | | QSNSGILKDFWGDYLQYDKPYYMLNLYDPN |
| | | KYVDVNNVGIRGYMYLKGPRGSVMTTNIYL |
| | | NSSLYRGTKFIIKKYASGNKDNIVRNNDRV |
| | | YINVVVKNKEYRLATNASQAGVEKILSALE |
| | | IPDVGNLSQVVVMKSKNDQGITNKCKMNLQ |
| | | DNNGNDIGFIGFHQFNNIAKLVASNWYNRQ |
| | | IERSSRTLGCSWEFIPVDDGWGERPL |
| 109 | BoNT/ | MPKINSFNYNDPVNDRTILYIKPGGCQEFY |
| | E-A1 | KSFNIMKNIWIIPERNVIGTTPQDFHPPTS |
| | chimera | LKNGDSSYYDPNYLQSDEEKDRFLKIVTKI |
| | (wildtype A1 | FNRINNNLSGGILLEELSKANPYLGNDNTP |
| | receptor | DNQFHIGDASAVEIKFSNGSQDILLPNVII |
| | binding | MGAEPDLFETNSSNISLRNNYMPSNHRFGS |
| | domain) | IAIVTFSPEYSFRFNDNCMNEFIQDPALTL |
| | | MHELIHSLHGLYGAKGITTKYTITQKQNPL |
| | | ITNIRGTNIEEFLTFGGTDLNIITSAQSND |
| | | IYTNLLADYKKIASKLSKVQVSNPLLNPYK |
| | | DVFEAKYGLDKDASGIYSVNINKENDIFKK |
| | | LYSFTEFDLRTKFQVKCRQTYIGQYKYFKL |
| | | SNLLNDSIYNISEGYNINNLKVNFRGQNAN |
| | | LNPRIITPITGRGLVKKIIRFCKNIVSVKG |
| | | IRKSICIEINNGELFFVASENSYNDDNINT |
| | | PKEIDDTVTSNNNYENDLDQVILNFNSESA |
| | | PGLSDEKLNLTIQNDAYIPKYDSNGTSDIE |
| | | QHDVNELNVFFYLDAQKVPEGENNVNLTSS |
| | | IDTALLEQPKIYTFFSSEFINNVNKPVQAA |
| | | LFVSWIQQVLVDFTTEANQKSTVDKIADIS |
| | | IVVPYIGLALNIGNEAQKGNFKDALELLGA |
| | | GILLEFEPELLIPTILVFTIKSFLGSSDNK |
| | | NKVIKAINNALKERDEKWKEVYSFIVSNWM |
| | | TKINTQFNKRKEQMYQALQNQVNAIKTIIE |
| | | SKYNSYTLEEKNELTNKYDIKQIENELNQK |
| | | VSIAMNNIDRFLTESSISYLMKIINEVKIN |
| | | KLREYDENVKTYLLNYIIQHGSILGESQQE |
| | | LNSMVTDTLNNSIPFKLSSYTDDKILISYF |
| | | NKFFIINTSILNLRYESNHLIDLSRYASKI |
| | | NIGSKVNFDPIDKNQIQLFNLESSKIEVIL |
| | | KNAIVYNSMYENFSTSFWIRIPKYFNSISL |
| | | NNEYTIINCMENNSGWKVSLNYGEIIWTLQ |
| | | DTQEIKQRVVFKYSQMINISDYINRWIFVT |
| | | ITNNRLNNSKIYINGRLIDQKPISNLGNIH |
| | | ASNNIMFKLDGCRDTHRYIWIKYFNLFDKE |
| | | LNEKEIKDLYDNQSNSGILKDFWGDYLQYD |
| | | KPYYMLNLYDPNKYVDVNNVGIRGYMYLKG |
| | | PRGSVMTTNIYLNSSLYRGTKFIIKKYASG |
| | | NKDNIVRNNDRVYINVVVKNKEYRLATNAS |
| | | QAGVEKILSALEIPDVGNLSQVVVMKSKND |
| | | QGITNKCKMNLQDNNGNDIGFIGFHQFNNI |
| | | AKLVASNWYNRQIERSSRTLGCSWEFIPVD |
| | | DGWGERPL |
| 110 | BoNT/ | MPVVINSFNYNDPVNDDTILYMQIPYEEKS |
| | F-A1 | KKYYKAFEIMRNVWIIPERNTIGTDPSDFD |
| | chimera | PPASLENGSSAYYDPNYLTTDAEKDRYLKT |
| | (wildtype A1 | TIKLFKRINSNPAGEVLLQEISYAKPYLGN |
| | receptor | EHTPINEFHPVTRTTSVNIKSSTNVKSSII |
| | binding | LNLLVLGAGPDIFENSSYPVRKLMDSGGVY |
| | domain) | DPSNDGFGSINIVTFSPEYEYTFNDISGGY |
| | | NSSTESFIADPAISLAHELIHALHGLYGAR |
| | | GVTYKETIKVKQAPLMIAEKPIRLEEFLTF |
| | | GGQDLNIITSAMKEKIYNNLLANYEKIATR |
| | | LSRVNSAPPEYDINEYKDYFQWKYGLDKNA |
| | | DGSYTVNENKFNEIYKKLYSFTEIDLANKF |
| | | KVKCRNTYFIKYGFLKVPNLLDDDIYTVSE |
| | | GFNIGNLAVNNRGQNIKLNPKIIDSIPDKG |
| | | LVEKIVKFCKSVIPRKGTKAPPRLCIRVNN |
| | | RELFFVASESSYNENDINTPKEIDDTTNLN |
| | | NNYRNNLDEVILDYNSETIPQISNQTLNTL |
| | | VQDDSYVPRYDSNGTSEIEEHNVVDLNVFF |
| | | YLHAQKVPEGETNISLTSSIDTALSEESQV |
| | | YTFFSSEFINTINKPVHAALFISWINQVIR |
| | | DFTTEATQKSTFDKIADISLVVPYVGLALN |
| | | IGNEVQKENFKEAFELLGAGILLEFVPELL |
| | | IPTILVFTIKSFIGSSENKNKIIKAINNSL |
| | | MERETKWKEIYSWIVSNWLTRINTQFNKRK |
| | | EQMYQALQNQVDAIKTVIEYKYNNYTSDER |
| | | NRLESEYNINNIREELNKKVSLAMENIERF |
| | | ITESSIFYLMKLINEAKVSKLREYDEGVKE |
| | | YLLDYISEHRSILGNSVQELNDLVTSTLNN |
| | | SIPFELSSYTNDKILILYFNKLYIINTSIL |
| | | NLRYESNHLIDLSRYASKINIGSKVNFDPI |
| | | DKNQIQLFNLESSKIEVILKNAIVYNSMYE |
| | | NFSTSFWIRIPKYFNSISLNNEYTIINCME |
| | | NNSGWKVSLNYGEIIWTLQDTQEIKQRVVF |
| | | KYSQMINISDYINRWIFVTITNNRLNNSKI |
| | | YINGRLIDQKPISNLGNIHASNNIMFKLDG |
| | | CRDTHRYIWIKYFNLFDKELNEKEIKDLYD |
| | | NQSNSGILKDFWGDYLQYDKPYYMLNLYDP |
| | | NKYVDVNNVGIRGYMYLKGPRGSVMTTNIY |
| | | LNSSLYRGTKFIIKKYASGNKDNIVRNNDR |
| | | VYINVVVKNKEYRLATNASQAGVEKILSAL |
| | | EIPDVGNLSQVVVMKSKNDQGITNKCKMNL |
| | | QDNNGNDIGFIGFHQFNNIAKLVASNWYNR |
| | | QIERSSRTLGCSWEFIPVDDGWGERPL |
| 111 | BoNT/ | MPVNIKXFNYNDPINNDDIIMMEPFNDPGP |
| | G-A1 | GTYYKAFRIIDRIWIVPERFTYGFQPDQFN |
| | chimera | ASTGVFSKDVYEYYDPTYLKTDAEKDKFLK |
| | (wildtype A1 | TMIKLFNRINSKPSGQRLLDMIVDAIPYLG |
| | receptor | NASTPPDKFAANVANVSINKKIIQPGAEDQ |
| | binding | IKGLMTNLIIFGPGPVLSDNFTDSMIMNGH |
| | domain) | SPISEGFGARMMIRFCPSCLNVFNNVQENK |
| | | DTSIFSRRAYFADPALTLMHELIHVLHGLY |
| | | GIKISNLPITPNTKEFFMQHSDPVQAEELY |
| | | TFGGHDPSVISPSTDMNIYNKALQNFQDIA |
| | | NRLNIVSSAQGSGIDISLYKQIYKNKYDFV |
| | | EDPNGKYSVDKDKFDKLYKALMFGFTETNL |
| | | AGEYGIKTRYSYFSEYLPPIKTEKLLDNTI |
| | | YTQNEGENIASKNLKTEFNGQNKAVNKEAY |
| | | EEISLEHLVIYRIAMCKPVMYKNTGKSEQC |
| | | IIVNNEDLFFIANKDSFSKDLAKAETIAYN |
| | | TQNNTIENNFSIDQLILDNDLSSGIDLPNE |
| | | NTEPFTNFDDIDIPVYIKQSALKKIFVDGD |
| | | SLFEYLHAQTFPSNIENLQLTNSLNDALRN |
| | | NNKVYTFFSTNLVEKANTVVGASLFVNWVK |
| | | GVIDDFTSESTQKSTIDKVSDVSIIIPYIG |
| | | PALNVGNETAKENFKNAFEIGGAAILMEFI |
| | | PELIVPIVGFFTLESYVGNKGHIIMTISNA |
| | | LKKRDQKWTDMYGLIVSQWLSTVNTQFYTI |
| | | KERMYNALNNQSQAIEKIIEDQYNRYSEED |
| | | KMNINIDFNDIDFKLNQSINLAINNIDDFI |
| | | NQCSISYLMNRMIPLAVKKLKDFDDNLKRD |
| | | LLEYIDTNELYLLDEVNILKSKVNRHLKDS |
| | | IPFDLSLYTKDTILIQVFNNYIIINTSILN |
| | | LRYESNHLIDLSRYASKINIGSKVNFDPID |
| | | KNQIQLFNLESSKIEVILKNAIVYNSMYEN |
| | | FSTSFWIRIPKYFNSISLNNEYTIINCMEN |
| | | NSGWKVSLNYGEIIWTLQDTQEIKQRVVFK |
| | | YSQMINISDYINRWIFVTITNNRLNNSKIY |
| | | INGRLIDQKPISNLGNIHASNNIMFKLDGC |
| | | RDTHRYIWIKYFNLFDKELNEKEIKDLYDN |
| | | QSNSGILKDFWGDYLQYDKPYYMLNLYDPN |
| | | KYVDVNNVGIRGYMYLKGPRGSVMTTNIYL |
| | | NSSLYRGTKFIIKKYASGNKDNIVRNNDRV |
| | | YINVVVKNKEYRLATNASQAGVEKILSALE |
| | | IPDVGNLSQVVVMKSKNDQGITNKCKMNLQ |
| | | DNNGNDIGFIGFHQFNNIAKLVASNWYNRQ |
| | | IERSSRTLGCSWEFIPVDDGWGERPL |
| 112 | BoNT/ | MPVVINSFNYDDPVNDNTIIYIRPPYYETS |
| | H-A1 | NTYFKAFQIMDNVWIIPERYRLGIDPSLFN |
| | chimera | PPVSLKAGSDGYFDPNYLSTNTEKNKYLQI |
| | (wildtype A1 | MIKLFKRINSKPAGQILLEEIKNAIPYLGN |
| | receptor | SYTQEEQFTTNNRTVSFNVKLANGNIVQQM |
| | binding | ANLIIWGPGPDLTTNKTGGIIYSPYQSMEA |
| | domain) | TPYKDGFGSIMTVEFSPEYATAFNDISIAS |
| | | HSPSLFIKDPALILMHELIHVLHGLYGTYI |
| | | TEYKITPNVVQSYMKVTKPITSAEFLTFGG |
| | | RDRNIVPQSIQSQLYNKVLSDYKRIASRLN |
| | | KVNTATALINIDEFKNLYEWKYQFAKDSNG |
| | | VYSVDLNKFEQLYKKIYSFTEFNLAYEFKI |
| | | KTRLGYLAENFGPFYLPNLLDDSIYTEVDG |
| | | FNIGALSINYQGQNIGSDINSIKKLQGQGV |
| | | VSRVVRLCSNSNTKNSLCITVNNRDLFFIA |
| | | SQESYGENTINTYKEIDDTTTLDPSFEDIL |
| | | DKVILNFNEQVIPQMPNRNVSTDIQKDNYI |
| | | PKYDYNRTDIIDSYEVGRNYNTFFYLNAQK |
| | | FSPNESNITLTSSFDTGLLEGSKVYTFFSS |
| | | DFINNINKPVQALLFIEWVKQVIRDFTTEA |
| | | TKTSTVDKLKDISLVVPYIGLALNIGDEIY |
| | | KQHFAEAVELVGAGLLLEFSPEFLIPTLLI |
| | | FTIKGYLTGSIRDKDKIIKTLDNALNVRDQ |
| | | KWKELYRWVVSKWLTTINTQFNKRKEQMYK |
| | | ALKNQATAIKKIIENKYNNYTTDEKSKIDS |
| | | SYNINEIERTLNEKINLAMKNIEQFITESS |
| | | IAYLINIINNETIQKLKSYDDLVRRYLLGY |
| | | IRNHSSILGNSVEELNSKVNNHLDNGIPFE |
| | | LSSYTNDSLLIRYFNKNYIINTSILNLRYE |
| | | SNHLIDLSRYASKINIGSKVNFDPIDKNQI |
| | | QLFNLESSKIEVILKNAIVYNSMYENFSTS |
| | | FWIRIPKYFNSISLNNEYTIINCMENNSGW |
| | | KVSLNYGEIIWTLQDTQEIKQRVVFKYSQM |
| | | INISDYINRWIFVTITNNRLNNSKIYINGR |
| | | LIDQKPISNLGNIHASNNIMFKLDGCRDTH |
| | | RYIWIKYFNLFDKELNEKEIKDLYDNQSNS |
| | | GILKDFWGDYLQYDKPYYMLNLYDPNKYVD |
| | | VNNVGIRGYMYLKGPRGSVMTTNIYLNSSL |
| | | YRGTKFIIKKYASGNKDNIVRNNDRVYINV |
| | | VVKNKEYRLATNASQAGVEKILSALEIPDV |
| | | GNLSQVVVMKSKNDQGITNKCKMNLQDNNG |
| | | NDIGFIGFHQFNNIAKLVASNWYNRQIERS |
| | | SRTLGCSWEFIPVDDGWGERPL |
| 113 | BoNT/ | MKLEINKFNYNDPIDGINVITMRPPRHSDK |
| | X-A1 | INKGKGPFKAFQVIKNIWIVPERYNFTNNT |
| | chimera | NDLNIPSEPIMEADAIYNPNYLNTPSEKDE |
| | (wildtype A1 | FLQGVIKVLERIKSKPEGEKLLELISSSIP |
| | receptor | LPLVSNGALTLSDNETIAYQENNNIVSNLQ |
| | binding | ANLVIYGPGPDIANNATYGLYSTPISNGEG |
| | domain) | TLSEVSFSPFYLKPFDESYGNYRSLVNIVN |
| | | KFVKREFAPDPASTLMHELVHVTHNLYGIS |
| | | NRNFYYNFDTGKIETSRQQNSLIFEELLTF |
| | | GGIDSKAISSLIIKKIIETAKNNYTTLISE |
| | | RLNTVTVENDLLKYIKNKIPVQGRLGNFKL |
| | | DTAEFEKKLNTILFVLNESNLAQRFSILVR |
| | | KHYLKERPIDPIYVNILDDNSYSTLEGFNI |
| | | SSQGSNDFQGQLLESSYFEKIESNALRAFI |
| | | KICPRNGLLYNAIYRNSKNYLNNIDLEDKK |
| | | TTSKTNVSYPCSLLNGCIEVENKDLFLISN |
| | | KDSLNDINLSEEKIKPETTVFFKDKLPPQD |
| | | ITLSNYDFTEANSIPSISQQNILERNEELY |
| | | EPIRNSLFEIKTIYVDKLTTFHFLEAQNID |
| | | ESIDSSKIRVELTDSVDEALSNPNKVYSPF |
| | | KNMSNTINSIETGITSTYIFYQWLRSIVKD |
| | | FSDETGKIDVIDKSSDTLAIVPYIGPLLNI |
| | | GNDIRHGDFVGAIELAGITALLEYVPEFTI |
| | | PILVGLEVIGGELAREQVEAIVNNALDKRD |
| | | QKWAEVYNITKAQWWGTIHLQINTRLAHTY |
| | | KALSRQANAIKMNMEFQLANYKGNIDDKAK |
| | | IKNAISETEILLNKSVEQAMKNTEKFMIKL |
| | | SNSYLTKEMIPKVQDNLKNFDLETKKTLDK |
| | | FIKEKEDILGTNLSSSLRRKVSIRLNKNIA |
| | | FDINDIPFSEFDDLINQYKIINTSILNLRY |
| | | ESNHLIDLSRYASKINIGSKVNFDPIDKNQ |
| | | IQLFNLESSKIEVILKNAIVYNSMYENFST |
| | | SFWIRIPKYFNSISLNNEYTIINCMENNSG |
| | | WKVSLNYGEIIWTLQDTQEIKQRVVFKYSQ |
| | | MINISDYINRWIFVTITNNRLNNSKIYING |
| | | RLIDQKPISNLGNIHASNNIMFKLDGCRDT |
| | | HRYIWIKYFNLFDKELNEKEIKDLYDNQSN |
| | | SGILKDFWGDYLQYDKPYYMLNLYDPNKYV |
| | | DVNNVGIRGYMYLKGPRGSVMTTNIYLNSS |
| | | LYRGTKFIIKKYASGNKDNIVRNNDRVYIN |
| | | VVVKNKEYRLATNASQAGVEKILSALEIPD |
| | | VGNLSQVVVMKSKNDQGITNKCKMNLQDNN |
| | | GNDIGFIGFHQFNNIAKLVASNWYNRQIER |
| | | SSRTLGCSWEFIPVDDGWGERPL |
| 114 | BoNT/ | MVTINDLHYSDPIDEDNIINMRIPLYDLEV |
| | EN-A1 | DDQFINHNVPDLKAFQVFPNVWVVPERYTF |
| | chimera | YSTMKNLDAPANPSRSSYYDPTYLQSDAEK |
| | (wildtype A1 | EVFLQQMILLFKRINSTQEGQQFLNLLSRS |
| | receptor | IPVPYESNGDVAMGTTQVIKQMDDKGNVLK |
| | binding | HRRAHIIIYGPGPDLMAKGSKALTKSRETG |
| | domain) | RGCMAEIYFSPMYHKTYSTKLTNKNSLVDK |
| | | SVQEFVPDPAVTLIHELCHGLHALYGIDLG |
| | | NVGSWEFNSNPNSLFSSWFSSKEAVNFEEV |
| | | MTFGGEDVKVIKSEIDKKIPGILNLIKTTV |
| | | EPIINKITDPHDEMLQCLQSKYPSLKGTLG |
| | | QFFFDDTQLEKDIRDLWMVMNETMFAENLK |
| | | ALTRARYLVPKVENIVQVDILSPNVYTIDK |
| | | GFNHLSKGFKGQSVSQSYFRKISALARGAV |
| | | VRACPNPHFSSQRGLSSCIEILEDDLFIMS |
| | | SKDSFTDTDFSEPSVGPVSYKAKKGADTIL |
| | | DSTLSNYDFSKEINFTSTVPIITVEDPLET |
| | | DEDVPVISEDRTVYVDDYTTFHFLEAQKIG |
| | | KEVVPTQTKVVFTTNMEEALFDSKKVYTVF |
| | | ENTASRINEAGTGIANGMMFYQWLKGIVQD |
| | | FTEEATQKDTFDKISDVTMIVPYLGNILNI |
| | | GNDIRKGDFMGAVELGGVTILLEAIPELTL |
| | | PVLIGLTIIEDELEKEQVSQTVYNVLDKRD |
| | | EKWEEVYGFVKQQWWWMVHTQFETRILHAY |
| | | QALNHQVEAIKANMTYQLANYRGNQEDKEL |
| | | LEKAIDDTLQSLYYAVDQAMHNIKRFLIQS |
| | | SKSYLLNQMLPKTKEQLLAFDQQTLRNVND |
| | | FINKNQGVLGESLAKDLKKKVEKRLTSLPV |
| | | FNLEDLPISEFEDLIHSHEIDIQDSEVLNI |
| | | GVNNIINTSILNLRYESNHLIDLSRYASKI |
| | | NIGSKVNFDPIDKNQIQLFNLESSKIEVIL |
| | | KNAIVYNSMYENFSTSFWIRIPKYFNSISL |
| | | NNEYTIINCMENNSGWKVSLNYGEIIWTLQ |
| | | DTQEIKQRVVFKYSQMINISDYINRWIFVT |
| | | ITNNRLNNSKIYINGRLIDQKPISNLGNIH |
| | | ASNNIMFKLDGCRDTHRYIWIKYFNLFDKE |
| | | LNEKEIKDLYDNQSNSGILKDFWGDYLQYD |
| | | KPYYMLNLYDPNKYVDVNNVGIRGYMYLKG |
| | | PRGSVMTTNIYLNSSLYRGTKFIIKKYASG |
| | | NKDNIVRNNDRVYINVVVKNKEYRLATNAS |
| | | QAGVEKILSALEIPDVGNLSQVVVMKSKND |
| | | QGITNKCKMNLQDNNGNDIGFIGFHQFNNI |
| | | AKLVASNWYNRQIERSSRTLGCSWEFIPVD |
| | | DGWGERPL |
| 115 | BoNT/ | MPVTINNFNYNDPIDNNNIIMMEPPFARGT |
| | B-A2 | GRYYKAFKITDRIWIIPERYTFGYKPEDFN |
| | chimera | KSSGIFNRDVCEYYDPDYLNTNDKKNIFLQ |
| | (wildtype A2 | TMIKLFNRIKSKPLGEKLLEMIINGIPYLG |
| | receptor | DRRVPLEEFNTNIASVTVNKLISNPGEVER |
| | binding | KKGIFANLIIFGPGPVLNENETIDIGIQNH |
| | domain) | FASREGFGGIMQMKFCPEYVSVFNNVQENK |
| | | GASIFNRRGYFSDPALILMHELIHVLHGLY |
| | | GIKVDDLPIVPNEKKFFMQSTDAIQAEELY |
| | | TFGGQDPSIITPSTDKSIYDKVLQNFRGIV |
| | | DRLNKVLVCISDPNININIYKNKFKDKYKF |
| | | VEDSEGKYSIDVESFDKLYKSLMFGFTETN |
| | | IAENYKIKTRASYFSDSLPPVKIKNLLDNE |
| | | IYTIEEGFNISDKDMEKEYRGQNKAINKQA |
| | | YEEISKEHLAVYKIQMCKSVKAPGICIDVD |
| | | NEDLFFIADKNSFSDDLSKNERIEYNTQSN |
| | | YIENDFPINELILDTDLISKIELPSENTES |
| | | LTDFNVDVPVYEKQPAIKKIFTDENTIFQY |
| | | LYSQTFPLDIRDISLTSSFDDALLFSNKVY |
| | | SFFSMDYIKTANKVVEAGLFAGWVKQIVND |
| | | FVIEANKSNTMDKIADISLIVPYIGLALNV |
| | | GNETAKGNFENAFEIAGASILLEFIPELLI |
| | | PVVGAFLLESYIDNKNKIIKTIDNALTKRN |
| | | EKWSDMYGLIVAQWLSTVNTQFYTIKEGMY |
| | | KALNYQAQALEEIIKYRYNIYSEKEKSNIN |
| | | IDFNDINSKLNEGINQAIDNINNFINGCSV |
| | | SYLMKKMIPLAVEKLLDFDNTLKKNLLNYI |
| | | DENKLYLIGSAEYEKSKVNKYLKTIMPFDL |
| | | SIYTNDTILIEMFNKYNIVNTSILSIVYKK |
| | | DDLIDLSRYGAKINIGDRVYYDSIDKNQIK |
| | | LINLESSTIEVILKNAIVYNSMYENFSTSF |
| | | WIKIPKYFSKINLNNEYTIINCIENNSGWK |
| | | VSLNYGEIIWTLQDNKQNIQRVVFKYSQMV |
| | | NISDYINRWIFVTITNNRLTKSKIYINGRL |
| | | IDQKPISNLGNIHASNKIMFKLDGCRDPRR |
| | | YIMIKYFNLFDKELNEKEIKDLYDSQSNSG |
| | | ILKDFWGNYLQYDKPYYMLNLFDPNKYVDV |
| | | NNIGIRGYMYLKGPRGSVVTTNIYLNSTLY |
| | | EGTKFIIKKYASGNEDNIVRNNDRVYINVV |
| | | VKNKEYRLATNASQAGVEKILSALEIPDVG |
| | | NLSQVVVMKSKDDQGIRNKCKMNLQDNNGN |
| | | DIGFIGFHLYDNIAKLVASNWYNRQVGKAS |
| | | RTFGCSWEFIPVDDGWGESSL |
| 116 | BoNT/ | MPITINNFNYSDPVDNKNILYLDTHLNTLA |
| | C-A2 | NEPEKAFRITGNIWVIPDRFSRNSNPNLNK |
| | chimera | PPRVTSPKSGYYDPNYLSTDSDKDTFLKEI |
| | (wildtype A2 | IKLFKRINSREIGEELIYRLSTDIPFPGNN |
| | receptor | NTPINTFDFDVDFNSVDVKTRQGNNWVKTG |
| | binding | SINPSVIITGPRENIIDPETSTFKLTNNTF |
| | domain) | AAQEGFGALSIISISPRFMLTYSNATNDVG |
| | | EGRFSKSEFCMDPILILMHELNHAMHNLYG |
| | | IAIPNDQTISSVTSNIFYSQYNVKLEYAEI |
| | | YAFGGPTIDLIPKSARKYFEEKALDYYRSI |
| | | AKRLNSITTANPSSFNKYIGEYKQKLIRKY |
| | | RFVVESSGEVTVNRNKFVELYNELTQIFTE |
| | | FNYAKIYNVQNRKIYLSNVYTPVTANILDD |
| | | NVYDIQNGFNIPKSNLNVLFMGQNLSRNPA |
| | | LRKVNPENMLYLFTKFCHKAIDGRSLYNKT |
| | | LDCRELLVKNTDLPFIGDISDVKTDIFLRK |
| | | DINEETEVIYYPDNVSVDQVILSKNTSEHG |
| | | QLDLLYPSIDSESEILPGENQVFYDNRTQN |
| | | VDYLNSYYYLESQKLSDNVEDFTFTRSIEE |
| | | ALDNSAKVYTYFPTLANKVNAGVQGGLFLM |
| | | WANDVVEDFTTNILRKDTLDKISDVSAIIP |
| | | YIGPALNISNSVRRGNFTEAFAVTGVTILL |
| | | EAFPEFTIPALGAFVIYSKVQERNEIIKTI |
| | | DNCLEQRIKRWKDSYEWMMGTWLSRIITQF |
| | | NNISYQMYDSLNYQAGAIKAKIDLEYKKYS |
| | | GSDKENIKSQVENLKNSLDVKISEAMNNIN |
| | | KFIRECSVTYLFKNMLPKVIDELNEFDRNT |
| | | KAKLINLIDSHNIILVGEVDKLKAKVNNSF |
| | | QNTIPFNIFSYTNNSLLKDIINEYFNNIND |
| | | IVNTSILSIVYKKDDLIDLSRYGAKINIGD |
| | | RVYYDSIDKNQIKLINLESSTIEVILKNAI |
| | | VYNSMYENFSTSFWIKIPKYFSKINLNNEY |
| | | TIINCIENNSGWKVSLNYGEIIWTLQDNKQ |
| | | NIQRVVFKYSQMVNISDYINRWIFVTITNN |
| | | RLTKSKIYINGRLIDQKPISNLGNIHASNK |
| | | IMFKLDGCRDPRRYIMIKYFNLFDKELNEK |
| | | EIKDLYDSQSNSGILKDFWGNYLQYDKPYY |
| | | MLNLFDPNKYVDVNNIGIRGYMYLKGPRGS |
| | | VVTTNIYLNSTLYEGTKFIIKKYASGNEDN |
| | | IVRNNDRVYINVVVKNKEYRLATNASQAGV |
| | | EKILSALEIPDVGNLSQVVVMKSKDDQGIR |
| | | NKCKMNLQDNNGNDIGFIGFHLYDNIAKLV |
| | | ASNWYNRQVGKASRTFGCSWEFIPVDDGWG |
| | | ESSL |
| 117 | BoNT/ | MTWPVKDFNYSDPVNDNDILYLRIPQNKLI |
| | D-A2 | TTPVKAFMITQNIWVIPERFSSDTNPSLSK |
| | chimera | PPRPTSKYQSYYDPSYLSTDEQKDTFLKGI |
| | (wildtype A2 | IKLFKRINERDIGKKLINYLVVGSPFMGDS |
| | receptor | STPEDTFDFTRHTTNIAVEKFENGSWKVTN |
| | binding | IITPSVLIFGPLPNILDYTASLTLQGQQSN |
| | domain) | PSFEGFGTLSILKVAPEFLLTFSDVTSNQS |
| | | SAVLGKSIFCMDPVIALMHELTHSLHQLYG |
| | | INIPSDKRIRPQVSEGFFSQDGPNVQFEEL |
| | | YTFGGLDVEIIPQIERSQLREKALGHYKDI |
| | | AKRLNNINKTIPSSWISNIDKYKKIFSEKY |
| | | NFDKDNTGNFVVNIDKFNSLYSDLTNVMSE |
| | | VVYSSQYNVKNRTHYFSRHYLPVFANILDD |
| | | NIYTIRDGFNLTNKGFNIENSGQNIERNPA |
| | | LQKLSSESVVDLFTKVCLRLTKNSRDDSTC |
| | | IKVKNNRLPYVADKDSISQEIFENKIITDE |
| | | TNVQNYSDNFSLDESILDGQVPINPEIVDP |
| | | LLPNVNMEPLNLPGEEIVFYDDITKYVDYL |
| | | NSYYYLESQKLSNNVENITLTTSVEEALGY |
| | | SNKIYTFLPSLAEKVNKGVQAGLFLNWANE |
| | | VVEDFTTNIMKKDTLDKISDVSVIIPYIGP |
| | | ALNIGNSALRGNFKQAFATAGVAFLLEGFP |
| | | EFTIPALGVFTFYSSIQEREKIIKTIENCL |
| | | EQRVKRWKDSYQWMVSNWLSRITTQFNHIN |
| | | YQMYDSLSYQADAIKAKIDLEYKKYSGSDK |
| | | ENIKSQVENLKNSLDVKISEAMNNINKFIR |
| | | ECSVTYLFKNMLPKVIDELNKFDLRTKTEL |
| | | INLIDSHNIILVGEVDRLKAKVNESFENTM |
| | | PFNIFSYTNNSLLKDIINEYFNIVNTSILS |
| | | IVYKKDDLIDLSRYGAKINIGDRVYYDSID |
| | | KNQIKLINLESSTIEVILKNAIVYNSMYEN |
| | | FSTSFWIKIPKYFSKINLNNEYTIINCIEN |
| | | NSGWKVSLNYGEIIWTLQDNKQNIQRVVFK |
| | | YSQMVNISDYINRWIFVTITNNRLTKSKIY |
| | | INGRLIDQKPISNLGNIHASNKIMFKLDGC |
| | | RDPRRYIMIKYFNLFDKELNEKEIKDLYDS |
| | | QSNSGILKDFWGNYLQYDKPYYMLNLFDPN |
| | | KYVDVNNIGIRGYMYLKGPRGSVVTTNIYL |
| | | NSTLYEGTKFIIKKYASGNEDNIVRNNDRV |
| | | YINVVVKNKEYRLATNASQAGVEKILSALE |
| | | IPDVGNLSQVVVMKSKDDQGIRNKCKMNLQ |
| | | DNNGNDIGFIGFHLYDNIAKLVASNWYNRQ |
| | | VGKASRTFGCSWEFIPVDDGWGESSL |
| 118 | BoNT/ | MPKINSFNYNDPVNDRTILYIKPGGCQEFY |
| | E-A2 | KSFNIMKNIWIIPERNVIGTTPQDFHPPTS |
| | chimera | LKNGDSSYYDPNYLQSDEEKDRFLKIVTKI |
| | (wildtype A2 | FNRINNNLSGGILLEELSKANPYLGNDNTP |
| | receptor | DNQFHIGDASAVEIKFSNGSQDILLPNVII |
| | binding | MGAEPDLFETNSSNISLRNNYMPSNHRFGS |
| | domain) | IAIVTFSPEYSFRFNDNCMNEFIQDPALTL |
| | | MHELIHSLHGLYGAKGITTKYTITQKQNPL |
| | | ITNIRGTNIEEFLTFGGTDLNIITSAQSND |
| | | IYTNLLADYKKIASKLSKVQVSNPLLNPYK |
| | | DVFEAKYGLDKDASGIYSVNINKENDIFKK |
| | | LYSFTEFDLRTKFQVKCRQTYIGQYKYFKL |
| | | SNLLNDSIYNISEGYNINNLKVNFRGQNAN |
| | | LNPRIITPITGRGLVKKIIRFCKNIVSVKG |
| | | IRKSICIEINNGELFFVASENSYNDDNINT |
| | | PKEIDDTVTSNNNYENDLDQVILNFNSESA |
| | | PGLSDEKLNLTIQNDAYIPKYDSNGTSDIE |
| | | QHDVNELNVFFYLDAQKVPEGENNVNLTSS |
| | | IDTALLEQPKIYTFFSSEFINNVNKPVQAA |
| | | LFVSWIQQVLVDFTTEANQKSTVDKIADIS |
| | | IVVPYIGLALNIGNEAQKGNFKDALELLGA |
| | | GILLEFEPELLIPTILVFTIKSFLGSSDNK |
| | | NKVIKAINNALKERDEKWKEVYSFIVSNWM |
| | | TKINTQFNKRKEQMYQALQNQVNAIKTIIE |
| | | SKYNSYTLEEKNELTNKYDIKQIENELNQK |
| | | VSIAMNNIDRFLTESSISYLMKIINEVKIN |
| | | KLREYDENVKTYLLNYIIQHGSILGESQQE |
| | | LNSMVTDTLNNSIPFKLSSYTDDKILISYF |
| | | NKFFIVNTSILSIVYKKDDLIDLSRYGAKI |
| | | NIGDRVYYDSIDKNQIKLINLESSTIEVIL |
| | | KNAIVYNSMYENFSTSFWIKIPKYFSKINL |
| | | NNEYTIINCIENNSGWKVSLNYGEIIWTLQ |
| | | DNKQNIQRVVFKYSQMVNISDYINRWIFVT |
| | | ITNNRLTKSKIYINGRLIDQKPISNLGNIH |
| | | ASNKIMFKLDGCRDPRRYIMIKYFNLFDKE |
| | | LNEKEIKDLYDSQSNSGILKDFWGNYLQYD |
| | | KPYYMLNLFDPNKYVDVNNIGIRGYMYLKG |
| | | PRGSVVTTNIYLNSTLYEGTKFIIKKYASG |
| | | NEDNIVRNNDRVYINVVVKNKEYRLATNAS |
| | | QAGVEKILSALEIPDVGNLSQVVVMKSKDD |
| | | QGIRNKCKMNLQDNNGNDIGFIGFHLYDNI |
| | | AKLVASNWYNRQVGKASRTFGCSWEFIPVD |
| | | DGWGESSL |
| 119 | BoNT/ | MPVVINSFNYNDPVNDDTILYMQIPYEEKS |
| | F-A2 | KKYYKAFEIMRNVWIIPERNTIGTDPSDFD |
| | chimera | PPASLENGSSAYYDPNYLTTDAEKDRYLKT |
| | (wildtype A2 | TIKLFKRINSNPAGEVLLQEISYAKPYLGN |
| | receptor | EHTPINEFHPVTRTTSVNIKSSTNVKSSII |
| | binding | LNLLVLGAGPDIFENSSYPVRKLMDSGGVY |
| | domain) | DPSNDGFGSINIVTFSPEYEYTFNDISGGY |
| | | NSSTESFIADPAISLAHELIHALHGLYGAR |
| | | GVTYKETIKVKQAPLMIAEKPIRLEEFLTF |
| | | GGQDLNIITSAMKEKIYNNLLANYEKIATR |
| | | LSRVNSAPPEYDINEYKDYFQWKYGLDKNA |
| | | DGSYTVNENKFNEIYKKLYSFTEIDLANKF |
| | | KVKCRNTYFIKYGFLKVPNLLDDDIYTVSE |
| | | GFNIGNLAVNNRGQNIKLNPKIIDSIPDKG |
| | | LVEKIVKFCKSVIPRKGTKAPPRLCIRVNN |
| | | RELFFVASESSYNENDINTPKEIDDTTNLN |
| | | NNYRNNLDEVILDYNSETIPQISNQTLNTL |
| | | VQDDSYVPRYDSNGTSEIEEHNVVDLNVFF |
| | | YLHAQKVPEGETNISLTSSIDTALSEESQV |
| | | YTFFSSEFINTINKPVHAALFISWINQVIR |
| | | DFTTEATQKSTFDKIADISLVVPYVGLALN |
| | | IGNEVQKENFKEAFELLGAGILLEFVPELL |
| | | IPTILVFTIKSFIGSSENKNKIIKAINNSL |
| | | MERETKWKEIYSWIVSNWLTRINTQFNKRK |
| | | EQMYQALQNQVDAIKTVIEYKYNNYTSDER |
| | | NRLESEYNINNIREELNKKVSLAMENIERF |
| | | ITESSIFYLMKLINEAKVSKLREYDEGVKE |
| | | YLLDYISEHRSILGNSVQELNDLVTSTLNN |
| | | SIPFELSSYTNDKILILYFNKLYIVNTSIL |
| | | SIVYKKDDLIDLSRYGAKINIGDRVYYDSI |
| | | DKNQIKLINLESSTIEVILKNAIVYNSMYE |
| | | NFSTSFWIKIPKYFSKINLNNEYTIINCIE |
| | | NNSGWKVSLNYGEIIWTLQDNKQNIQRVVF |
| | | KYSQMVNISDYINRWIFVTITNNRLTKSKI |
| | | YINGRLIDQKPISNLGNIHASNKIMFKLDG |
| | | CRDPRRYIMIKYFNLFDKELNEKEIKDLYD |
| | | SQSNSGILKDFWGNYLQYDKPYYMLNLFDP |
| | | NKYVDVNNIGIRGYMYLKGPRGSVVTTNIY |
| | | LNSTLYEGTKFIIKKYASGNEDNIVRNNDR |
| | | VYINVVVKNKEYRLATNASQAGVEKILSAL |
| | | EIPDVGNLSQVVVMKSKDDQGIRNKCKMNL |
| | | QDNNGNDIGFIGFHLYDNIAKLVASNWYNR |
| | | QVGKASRTFGCSWEFIPVDDGWGESSL |
| 120 | BoNT/ | MPVNIKXFNYNDPINNDDIIMMEPFNDPGP |
| | G-A2 | GTYYKAFRIIDRIWIVPERFTYGFQPDQFN |
| | chimera | ASTGVFSKDVYEYYDPTYLKTDAEKDKFLK |
| | (wildtype A2 | TMIKLFNRINSKPSGQRLLDMIVDAIPYLG |
| | receptor | NASTPPDKFAANVANVSINKKIIQPGAEDQ |
| | binding | IKGLMTNLIIFGPGPVLSDNFTDSMIMNGH |
| | domain) | SPISEGFGARMMIRFCPSCLNVFNNVQENK |
| | | DTSIFSRRAYFADPALTLMHELIHVLHGLY |
| | | GIKISNLPITPNTKEFFMQHSDPVQAEELY |
| | | TFGGHDPSVISPSTDMNIYNKALQNFQDIA |
| | | NRLNIVSSAQGSGIDISLYKQIYKNKYDFV |
| | | EDPNGKYSVDKDKFDKLYKALMFGFTETNL |
| | | AGEYGIKTRYSYFSEYLPPIKTEKLLDNTI |
| | | YTQNEGENIASKNLKTEFNGQNKAVNKEAY |
| | | EEISLEHLVIYRIAMCKPVMYKNTGKSEQC |
| | | IIVNNEDLFFIANKDSFSKDLAKAETIAYN |
| | | TQNNTIENNFSIDQLILDNDLSSGIDLPNE |
| | | NTEPFTNFDDIDIPVYIKQSALKKIFVDGD |
| | | SLFEYLHAQTFPSNIENLQLTNSLNDALRN |
| | | NNKVYTFFSTNLVEKANTVVGASLFVNWVK |
| | | GVIDDFTSESTQKSTIDKVSDVSIIIPYIG |
| | | PALNVGNETAKENFKNAFEIGGAAILMEFI |
| | | PELIVPIVGFFTLESYVGNKGHIIMTISNA |
| | | LKKRDQKWTDMYGLIVSQWLSTVNTQFYTI |
| | | KERMYNALNNQSQAIEKIIEDQYNRYSEED |
| | | KMNINIDFNDIDFKLNQSINLAINNIDDFI |
| | | NQCSISYLMNRMIPLAVKKLKDFDDNLKRD |
| | | LLEYIDTNELYLLDEVNILKSKVNRHLKDS |
| | | IPFDLSLYTKDTILIQVFNNYIIVNTSILS |
| | | IVYKKDDLIDLSRYGAKINIGDRVYYDSID |
| | | KNQIKLINLESSTIEVILKNAIVYNSMYEN |
| | | FSTSFWIKIPKYFSKINLNNEYTIINCIEN |
| | | NSGWKVSLNYGEIIWTLQDNKQNIQRVVFK |
| | | YSQMVNISDYINRWIFVTITNNRLTKSKIY |
| | | INGRLIDQKPISNLGNIHASNKIMFKLDGC |
| | | RDPRRYIMIKYFNLFDKELNEKEIKDLYDS |
| | | QSNSGILKDFWGNYLQYDKPYYMLNLFDPN |
| | | KYVDVNNIGIRGYMYLKGPRGSVVTTNIYL |
| | | NSTLYEGTKFIIKKYASGNEDNIVRNNDRV |
| | | YINVVVKNKEYRLATNASQAGVEKILSALE |
| | | IPDVGNLSQVVVMKSKDDQGIRNKCKMNLQ |
| | | DNNGNDIGFIGFHLYDNIAKLVASNWYNRQ |
| | | VGKASRTFGCSWEFIPVDDGWGESSL |
| 121 | BoNT/ | MPVVINSFNYDDPVNDNTIIYIRPPYYETS |
| | H-A2 | NTYFKAFQIMDNVWIIPERYRLGIDPSLFN |
| | chimera | PPVSLKAGSDGYFDPNYLSTNTEKNKYLQI |
| | (wildtype A2 | MIKLFKRINSKPAGQILLEEIKNAIPYLGN |
| | receptor | SYTQEEQFTTNNRTVSFNVKLANGNIVQQM |
| | binding | ANLIIWGPGPDLTTNKTGGIIYSPYQSMEA |
| | domain) | TPYKDGFGSIMTVEFSPEYATAFNDISIAS |
| | | HSPSLFIKDPALILMHELIHVLHGLYGTYI |
| | | TEYKITPNVVQSYMKVTKPITSAEFLTFGG |
| | | RDRNIVPQSIQSQLYNKVLSDYKRIASRLN |
| | | KVNTATALINIDEFKNLYEWKYQFAKDSNG |
| | | VYSVDLNKFEQLYKKIYSFTEFNLAYEFKI |
| | | KTRLGYLAENFGPFYLPNLLDDSIYTEVDG |
| | | FNIGALSINYQGQNIGSDINSIKKLQGQGV |
| | | VSRVVRLCSNSNTKNSLCITVNNRDLFFIA |
| | | SQESYGENTINTYKEIDDTTTLDPSFEDIL |
| | | DKVILNFNEQVIPQMPNRNVSTDIQKDNYI |
| | | PKYDYNRTDIIDSYEVGRNYNTFFYLNAQK |
| | | FSPNESNITLTSSFDTGLLEGSKVYTFFSS |
| | | DFINNINKPVQALLFIEWVKQVIRDFTTEA |
| | | TKTSTVDKLKDISLVVPYIGLALNIGDEIY |
| | | KQHFAEAVELVGAGLLLEFSPEFLIPTLLI |
| | | FTIKGYLTGSIRDKDKIIKTLDNALNVRDQ |
| | | KWKELYRWVVSKWLTTINTQFNKRKEQMYK |
| | | ALKNQATAIKKIIENKYNNYTTDEKSKIDS |
| | | SYNINEIERTLNEKINLAMKNIEQFITESS |
| | | IAYLINIINNETIQKLKSYDDLVRRYLLGY |
| | | IRNHSSILGNSVEELNSKVNNHLDNGIPFE |
| | | LSSYTNDSLLIRYFNKNYIVNTSILSIVYK |
| | | KDDLIDLSRYGAKINIGDRVYYDSIDKNQI |
| | | KLINLESSTIEVILKNAIVYNSMYENFSTS |
| | | FWIKIPKYFSKINLNNEYTIINCIENNSGW |
| | | KVSLNYGEIIWTLQDNKQNIQRVVFKYSQM |
| | | VNISDYINRWIFVTITNNRLTKSKIYINGR |
| | | LIDQKPISNLGNIHASNKIMFKLDGCRDPR |
| | | RYIMIKYFNLFDKELNEKEIKDLYDSQSNS |
| | | GILKDFWGNYLQYDKPYYMLNLFDPNKYVD |
| | | VNNIGIRGYMYLKGPRGSVVTTNIYLNSTL |
| | | YEGTKFIIKKYASGNEDNIVRNNDRVYINV |
| | | VVKNKEYRLATNASQAGVEKILSALEIPDV |
| | | GNLSQVVVMKSKDDQGIRNKCKMNLQDNNG |
| | | NDIGFIGFHLYDNIAKLVASNWYNRQVGKA |
| | | SRTFGCSWEFIPVDDGWGESSL |
| 122 | BoNT/ | MKLEINKFNYNDPIDGINVITMRPPRHSDK |
| | X-A2 | INKGKGPFKAFQVIKNIWIVPERYNFTNNT |
| | chimera | NDLNIPSEPIMEADAIYNPNYLNTPSEKDE |
| | (wildtype A2 | FLQGVIKVLERIKSKPEGEKLLELISSSIP |
| | receptor | LPLVSNGALTLSDNETIAYQENNNIVSNLQ |
| | binding | ANLVIYGPGPDIANNATYGLYSTPISNGEG |
| | domain) | TLSEVSFSPFYLKPFDESYGNYRSLVNIVN |
| | | KFVKREFAPDPASTLMHELVHVTHNLYGIS |
| | | NRNFYYNFDTGKIETSRQQNSLIFEELLTF |
| | | GGIDSKAISSLIIKKIIETAKNNYTTLISE |
| | | RLNTVTVENDLLKYIKNKIPVQGRLGNFKL |
| | | DTAEFEKKLNTILFVLNESNLAQRFSILVR |
| | | KHYLKERPIDPIYVNILDDNSYSTLEGFNI |
| | | SSQGSNDFQGQLLESSYFEKIESNALRAFI |
| | | KICPRNGLLYNAIYRNSKNYLNNIDLEDKK |
| | | TTSKTNVSYPCSLLNGCIEVENKDLFLISN |
| | | KDSLNDINLSEEKIKPETTVFFKDKLPPQD |
| | | ITLSNYDFTEANSIPSISQQNILERNEELY |
| | | EPIRNSLFEIKTIYVDKLTTFHFLEAQNID |
| | | ESIDSSKIRVELTDSVDEALSNPNKVYSPF |
| | | KNMSNTINSIETGITSTYIFYQWLRSIVKD |
| | | FSDETGKIDVIDKSSDTLAIVPYIGPLLNI |
| | | GNDIRHGDFVGAIELAGITALLEYVPEFTI |
| | | PILVGLEVIGGELAREQVEAIVNNALDKRD |
| | | QKWAEVYNITKAQWWGTIHLQINTRLAHTY |
| | | KALSRQANAIKMNMEFQLANYKGNIDDKAK |
| | | IKNAISETEILLNKSVEQAMKNTEKFMIKL |
| | | SNSYLTKEMIPKVQDNLKNFDLETKKTLDK |
| | | FIKEKEDILGTNLSSSLRRKVSIRLNKNIA |
| | | FDINDIPFSEFDDLINQYKIVNTSILSIVY |
| | | KKDDLIDLSRYGAKINIGDRVYYDSIDKNQ |
| | | IKLINLESSTIEVILKNAIVYNSMYENFST |
| | | SFWIKIPKYFSKINLNNEYTIINCIENNSG |
| | | WKVSLNYGEIIWTLQDNKQNIQRVVFKYSQ |
| | | MVNISDYINRWIFVTITNNRLTKSKIYING |
| | | RLIDQKPISNLGNIHASNKIMFKLDGCRDP |
| | | RRYIMIKYFNLFDKELNEKEIKDLYDSQSN |
| | | SGILKDFWGNYLQYDKPYYMLNLFDPNKYV |
| | | DVNNIGIRGYMYLKGPRGSVVTTNIYLNST |
| | | LYEGTKFIIKKYASGNEDNIVRNNDRVYIN |
| | | VVVKNKEYRLATNASQAGVEKILSALEIPD |
| | | VGNLSQVVVMKSKDDQGIRNKCKMNLQDNN |
| | | GNDIGFIGFHLYDNIAKLVASNWYNRQVGK |
| | | ASRTFGCSWEFIPVDDGWGESSL |
| 123 | BoNT/ | MVTINDLHYSDPIDEDNIINMRIPLYDLEV |
| | EN-A2 | DDQFINHNVPDLKAFQVFPNVWVVPERYTF |
| | chimera | YSTMKNLDAPANPSRSSYYDPTYLQSDAEK |
| | (wildtype A2 | EVFLQQMILLFKRINSTQEGQQFLNLLSRS |
| | receptor | IPVPYESNGDVAMGTTQVIKQMDDKGNVLK |
| | binding | HRRAHIIIYGPGPDLMAKGSKALTKSRETG |
| | domain) | RGCMAEIYFSPMYHKTYSTKLTNKNSLVDK |
| | | SVQEFVPDPAVTLIHELCHGLHALYGIDLG |
| | | NVGSWEFNSNPNSLFSSWFSSKEAVNFEEV |
| | | MTFGGEDVKVIKSEIDKKIPGILNLIKTTV |
| | | EPIINKITDPHDEMLQCLQSKYPSLKGTLG |
| | | QFFFDDTQLEKDIRDLWMVMNETMFAENLK |
| | | ALTRARYLVPKVENIVQVDILSPNVYTIDK |
| | | GFNHLSKGFKGQSVSQSYFRKISALARGAV |
| | | VRACPNPHFSSQRGLSSCIEILEDDLFIMS |
| | | SKDSFTDTDFSEPSVGPVSYKAKKGADTIL |
| | | DSTLSNYDFSKEINFTSTVPIITVEDPLET |
| | | DEDVPVISEDRTVYVDDYTTFHFLEAQKIG |
| | | KEVVPTQTKVVFTTNMEEALFDSKKVYTVF |
| | | ENTASRINEAGTGIANGMMFYQWLKGIVQD |
| | | FTEEATQKDTFDKISDVTMIVPYLGNILNI |
| | | GNDIRKGDFMGAVELGGVTILLEAIPELTL |
| | | PVLIGLTIIEDELEKEQVSQTVYNVLDKRD |
| | | EKWEEVYGFVKQQWWWMVHTQFETRILHAY |
| | | QALNHQVEAIKANMTYQLANYRGNQEDKEL |
| | | LEKAIDDTLQSLYYAVDQAMHNIKRFLIQS |
| | | SKSYLLNQMLPKTKEQLLAFDQQTLRNVND |
| | | FINKNQGVLGESLAKDLKKKVEKRLTSLPV |
| | | FNLEDLPISEFEDLIHSHEIDIQDSEVLNI |
| | | GVNNIVNTSILSIVYKKDDLIDLSRYGAKI |
| | | NIGDRVYYDSIDKNQIKLINLESSTIEVIL |
| | | KNAIVYNSMYENFSTSFWIKIPKYFSKINL |
| | | NNEYTIINCIENNSGWKVSLNYGEIIWTLQ |
| | | DNKQNIQRVVFKYSQMVNISDYINRWIFVT |
| | | ITNNRLTKSKIYINGRLIDQKPISNLGNIH |
| | | ASNKIMFKLDGCRDPRRYIMIKYFNLFDKE |
| | | LNEKEIKDLYDSQSNSGILKDFWGNYLQYD |
| | | KPYYMLNLFDPNKYVDVNNIGIRGYMYLKG |
| | | PRGSVVTTNIYLNSTLYEGTKFIIKKYASG |
| | | NEDNIVRNNDRVYINVVVKNKEYRLATNAS |
| | | QAGVEKILSALEIPDVGNLSQVVVMKSKDD |
| | | QGIRNKCKMNLQDNNGNDIGFIGFHLYDNI |
| | | AKLVASNWYNRQVGKASRTFGCSWEFIPVD |
| | | DGWGESSL |

### REFERENCES

[0323] 1. Schiavo, G., Matteoli, M. & Montecucco, C. Neurotoxins affecting neuroexocytosis. Physiol Rev 80, 717-766 (2000).
[0324] 2. Dong, M., Masuyer, G. & Stenmark, P. Botulinum and Tetanus Neurotoxins. Annu

[0325] Rev Biochem 88, 811-837 (2019).
[0326] 3. Johnson, E. A. Clostridial toxins as therapeutic agents: benefits of nature's most toxic proteins. Annu Rev Microbiol 53, 551-575 (1999).
[0327] 4. Aoki, K. R. Botulinum toxin: a successful therapeutic protein. Curr Med Chem 11, 3085-3092 (2004).
[0328] 5. Montecucco, C. & Molgo, J. Botulinal neurotoxins: revival of an old killer. Curr Opin Pharmacol 5, 274-279 (2005).
[0329] 6. Lange, O., Bigalke, H., Dengler, R., Wegner, F., deGroot, M. & Wohlfarth, K. Neutralizing antibodies and secondary therapy failure after treatment with botulinum toxin type A: much ado about nothing? Clin Neuropharmacol 32, 213-218 (2009).
[0330] 7. Chapman, M. A., Barron, R., Tanis, D. C., Gill, C. E. & Charles, P. D. Comparison of botulinum neurotoxin preparations for the treatment of cervical dystonia. Clin Ther 29, 1325-1337 (2007).
[0331] 8. Cote, T. R., Mohan, A. K., Polder, J. A., Walton, M. K. & Braun, M. M. Botulinum toxin type A injections: adverse events reported to the US Food and Drug Administration in therapeutic and cosmetic cases. J Am Acad Dermatol 53, 407-415 (2005).
[0332] 9. Dong, M., Tepp, W. H., Liu, H., Johnson, E. A. & Chapman, E. R. Mechanism of botulinum neurotoxin B and G entry into hippocampal neurons. J Cell Biol 179, 1511-1522 (2007).
[0333] 10. Peng, L., Tepp, W. H., Johnson, E. A. & Dong, M. Botulinum neurotoxin D uses synaptic vesicle protein SV2 and gangliosides as receptors. PLoS Pathog 7, e1002008 (2011).
[0334] 11. Dong, M., Richards, D. A., Goodnough, M. C., Tepp, W. H., Johnson, E. A. & Chapman, E. R. Synaptotagmins I and II mediate entry of botulinum neurotoxin B into cells. J

[0335] Cell Biol 162, 1293-1303 (2003).
[0336] 12. Nishiki, T., Kamata, Y., Nemoto, Y., Omori, A., Ito, T., Takahashi, M. & Kozaki, S. Identification of protein receptor for Clostridium botulinum type B neurotoxin in rat brain synaptosomes. J Biol Chem 269, 10498-10503 (1994).
[0337] 13. Rummel, A., Karnath, T., Henke, T., Bigalke, H. & Binz, T. Synaptotagmins I and II act as nerve cell receptors for botulinum neurotoxin G. J Biol Chem 279, 30865-30870 (2004).
[0338] 14. Peng, L., Berntsson, R. P., Tepp, W. H., Pitkin, R. M., Johnson, E. A., Stenmark, P. & Dong, M. Botulinum neurotoxin D-C uses synaptotagmin I/II as receptors and human synaptotagmin II is not an effective receptor for type B, D-C, and G toxins. J Cell Sci (2012).
[0339] 15. Jin, R., Rummel, A., Binz, T. & Brunger, A. T. Botulinum neurotoxin B recognizes its protein receptor with high affinity and specificity. Nature 444, 1092-1095 (2006).
[0340] 16. Chai, Q., Arndt, J. W., Dong, M., Tepp, W. H., Johnson, E. A., Chapman, E. R. & Stevens, R. C. Structural basis of cell surface receptor recognition by botulinum neurotoxin B. Nature 444, 1096-1100 (2006).
[0341] 17. Benoit, R. M., Frey, D., Hilbert, M., Kevenaar, J. T., Wieser, M. M., Stirnimann, C. U., McMillan, D., Ceska, T., Lebon, F., Jaussi, R., Steinmetz, M. O., Schertler, G. F., Hoogenraad, C. C., Capitani, G. & Kammerer, R. A. Structural basis for recognition of synaptic vesicle protein 2C by botulinum neurotoxin A. Nature 505, 108-111 (2014).
[0342] 18. Dong, M., Liu, H., Tepp, W. H., Johnson, E. A., Janz, R. & Chapman, E. R. Glycosylated SV2A and SV2B mediate the entry of botulinum neurotoxin E into neurons. Mol Biol Cell 19, 5226-5237 (2008).
[0343] 19. Dong, M., Yeh, F., Tepp, W. H., Dean, C., Johnson, E. A., Janz, R. & Chapman, E. R. SV2 is the protein receptor for botulinum neurotoxin A. Science 312, 592-596 (2006).
[0344] 20. Mahrhold, S., Rummel, A., Bigalke, H., Davletov, B. & Binz, T. The synaptic vesicle protein 2C mediates the uptake of botulinum neurotoxin A into phrenic nerves. FEBS Lett 580, 2011-2014 (2006).
[0345] 21. Rummel, A., Hafner, K., Mahrhold, S., Darashchonak, N., Holt, M., Jahn, R., Beermann, S., Karnath, T., Bigalke, H. & Binz, T. Botulinum neurotoxins C, E and F bind gangliosides via a conserved binding site prior to stimulation-dependent uptake with botulinum neurotoxin F utilising the three isoforms of SV2 as second receptor. J Neurochem 110, 1942-1954 (2009).
[0346] 22. Fu, Z., Chen, C., Barbieri, J. T., Kim, J. J. & Baldwin, M. R. Glycosylated SV2 and gangliosides as dual receptors for botulinum neurotoxin serotype F. Biochemistry 48, 5631-5641 (2009).
[0347] 23. Montecucco, C. How do tetanus and botulinum toxins bind to neuronal membranes? TIBS 11, 314-317 (1986).
[0348] 24. Peck, M. W., Smith, T. J., Anniballi, F., Austin, J. W., Bano, L., Bradshaw, M., Cuervo, P., Cheng, L. W., Derman, Y., Dorner, B. G., Fisher, A., Hill, K. K., Kalb, S. R., Korkeala, H., Lindstrom, M., Lista, F., Luquez, C., Mazuet, C., Pirazzini, M., Popoff, M. R., Rossetto, O., Rummel, A., Sesardic, D., Singh, B. R. & Stringer, S. C. Historical Perspectives and Guidelines for Botulinum Neurotoxin Subtype Nomenclature. Toxins (Basel) 9(2017).
[0349] 25. Pier, C. L., Chen, C., Tepp, W. H., Lin, G., Janda, K. D., Barbieri, J. T., Pellett, S. & Johnson, E. A. Botulinum neurotoxin subtype A2 enters neuronal cells faster than subtype A1.

[0350] FEBS Lett 585, 199-206 (2011).
[0351] 26. Yao, G., Zhang, S., Mahrhold, S., Lam, K. H., Stern, D., Bagramyan, K., Perry, K., Kalkum, M., Rummel, A., Dong, M. & Jin, R. N-linked glycosylation of SV2 is required for binding and uptake of botulinum neurotoxin A. Nat Struct Mol Biol 23, 656-662 (2016).
[0352] 27. Barash, J. R. & Arnon, S. S. A novel strain of Clostridium botulinum that produces type B and type H botulinum toxins. J Infect Dis 209, 183-191 (2014).
[0353] 28. Zhang, S., Masuyer, G., Zhang, J., Shen, Y., Lundin, D., Henriksson, L., Miyashita, S. I., Martinez-Carranza, M., Dong, M. & Stenmark, P. Identification and characterization of a novel botulinum neurotoxin. Nat Commun 8, 14130 (2017).
[0354] 29. Popp, M. W., Antos, J. M., Grotenbreg, G. M., Spooner, E. & Ploegh, H. L. Sortagging: a versatile method for protein labeling. Nat Chem Biol 3, 707-708 (2007).
[0355] 30. Aoki, K. R. A comparison of the safety margins of botulinum neurotoxin serotypes A, B, and F in mice. Toxicon 39, 1815-1820 (2001).
[0356] 31. Arnon, S. S., Schechter, R., Inglesby, T. V., Henderson, D. A., Bartlett, J. G., Ascher, M. S., Eitzen, E., Fine, A. D., Hauer, J., Layton, M., Lillibridge, S., Osterholm, M. T., O'Toole, T., Parker, G., Perl, T. M., Russell, P. K., Swerdlow, D. L. & Tonat, K. Botulinum toxin as a biological weapon: medical and public health management. Jama 285, 1059-1070 (2001).
[0357] 32. Montal, M. Botulinum neurotoxin: a marvel of protein design. Annu Rev Biochem 79, 591-617 (2010).
[0358] 33. Rossetto, O., Pirazzini, M. & Montecucco, C. Botulinum neurotoxins: genetic, structural and mechanistic insights. Nat Rev Microbiol 12, 535-549 (2014).
[0359] 34. Pirazzini, M., et al. Thioredoxin and its reductase are present on synaptic vesicles, and their inhibition prevents the paralysis induced by botulinum neurotoxins. Cell Rep 8, 1870-1878 (2014).
[0360] 35. Pirazzini, M., et al. The thioredoxin reductase—Thioredoxin redox system cleaves the interchain disulphide bond of botulinum neurotoxins on the cytosolic surface of synaptic vesicles. Toxicon 107, 32-36 (2015).
[0361] 36. JaHN, R. & Scheller, R. H. SNAREs—engines for membrane fusion. Nat Rev Mol Cell Biol 7, 631-643 (2006).
[0362] 37. Sudhof, T. C. & Rothman, J. E. Membrane fusion: grappling with SNARE and SM proteins. Science 323, 474-477 (2009).
[0363] 38. Gu, S., et al. Botulinum neurotoxin is shielded by NTNHA in an interlocked complex. Science 335, 977-981 (2012).
[0364] 39. Lee, K., et al. Molecular basis for disruption of E-cadherin adhesion by botulinum neurotoxin A complex. Science 344, 1405-1410 (2014).
[0365] 40. Lee, K., et al. Molecular basis for disruption of E-cadherin adhesion by botulinum neurotoxin A complex. Science 344, 1405-1410 (2014).
[0366] 41. Sugawara, Y., et al. Botulinum hemagglutinin disrupts the intercellular epithelial barrier by directly binding E-cadherin. J Cell Biol 189, 691-700 (2010).
[0367] 42. Hill, K. K., Xie, G., Foley, B. T. & Smith, T. J. Genetic diversity within the botulinum neurotoxin-producing bacteria and their neurotoxins. Toxicon 107, 2-8 (2015).

What is claimed is:

1. A modified Clostridial botulinum neurotoxin (BoNT) polypeptide comprising a modified receptor binding domain of Clostridial botulinum serotype A1 (BoNT/A1) comprising one or more amino acid substitutions at positions corresponding to 917, 953, 954, 955, 957, 968, 1025, 1026, 1052, 1062, 1063, 1064, 1065, 1066, 1145, 1156, 1232, 1272, 1278, 1288, 1289, 1292, 1294, and 1295 in SEQ ID NO: 1.

2. The modified BoNT polypeptide of claim 1, wherein the modified receptor binding domain comprises one or more amino acid substitutions at positions corresponding to 954, 955, 957, 1063, 1064, 1025, 1026, 1156, 1232, 1278, 1294, and 1295 in SEQ ID NO: 1.

3. The modified BoNT polypeptide of claim 1 or claim 2, wherein the modified receptor binding domain comprises an amino acid substitution at a position corresponding to 917 in SEQ ID NO: 1, optionally wherein the amino acid substitution corresponds to F917R or F917K in SEQ ID NO: 1.

4. The modified BoNT polypeptide of any one of claims 1-3, wherein the modified receptor binding domain comprises an amino acid substitution at a position corresponding to 953 in SEQ ID NO: 1, optionally wherein the amino acid substitution corresponds to F953H or F953Y in SEQ ID NO: 1.

5. The modified BoNT polypeptide of any one of claims 1-4, wherein the modified receptor binding domain comprises an amino acid substitution at a position corresponding to 954 in SEQ ID NO: 1, optionally wherein the amino acid substitution corresponds to N954S in SEQ ID NO: 1.

6. The modified BoNT polypeptide of any one of claims 1-5, wherein the modified receptor binding domain comprises an amino acid substitution at a position corresponding to 955 in SEQ ID NO: 1, optionally wherein the amino acid substitution corresponds to S955K in SEQ ID NO: 1.

7. The modified BoNT polypeptide of any one of claims 1-6, wherein the modified receptor binding domain comprises an amino acid substitution at a position corresponding to 957 in SEQ ID NO: 1, optionally wherein the amino acid substitution corresponds to S957N, S957Q, or S957Y in SEQ ID NO: 1.

8. The modified BoNT polypeptide of any one of claims 1-7, wherein the modified receptor binding domain comprises an amino acid substitution at a position corresponding to 968 in SEQ ID NO: 1, optionally wherein the amino acid substitution corresponds to M968I in SEQ ID NO: 1.

9. The modified BoNT polypeptide of any one of claims 1-8, wherein the modified receptor binding domain comprises an amino acid substitution at a position corresponding to 1025 in SEQ ID NO: 1, optionally wherein the amino acid substitution corresponds to N1025T in SEQ ID NO: 1.

10. The modified BoNT polypeptide of any one of claims 1-9, wherein the modified receptor binding domain comprises an amino acid substitution at a position corresponding to 1026 in SEQ ID NO: 1, optionally wherein the amino acid substitution corresponds to N1026K in SEQ ID NO: 1.

11. The modified BoNT polypeptide of any one of claims 1-10, wherein the modified receptor binding domain comprises an amino acid substitution at a position corresponding to 1052 in SEQ ID NO: 1, optionally wherein the amino acid substitution corresponds to N1052K in SEQ ID NO: 1.

12. The modified BoNT polypeptide of any one of claims 1-11, wherein the modified receptor binding domain comprises an amino acid substitution at a position corresponding to 1062 in SEQ ID NO: 1, optionally wherein the amino acid substitution corresponds to D1062E in SEQ ID NO: 1.

13. The modified BoNT polypeptide of any one of claims 1-12, wherein the modified receptor binding domain comprises an amino acid substitution at a position corresponding to 1063 in SEQ ID NO: 1, optionally wherein the amino acid substitution corresponds to T1063P in SEQ ID NO: 1.

14. The modified BoNT polypeptide of any one of claims 1-13, wherein the modified receptor binding domain comprises an amino acid substitution at a position corresponding to 1064 in SEQ ID NO: 1, optionally wherein the amino acid substitution corresponds to H1064R or H1064Q in SEQ ID NO: 1.

15. The modified BoNT polypeptide of any one of claims 1-14, wherein the modified receptor binding domain comprises an amino acid substitution at a position corresponding to 1065 in SEQ ID NO: 1, optionally wherein the amino acid substitution corresponds to R1065N in SEQ ID NO: 1.

16. The modified BoNT polypeptide of any one of claims 1-15, wherein the modified receptor binding domain comprises an amino acid substitution at a position corresponding to 1066 in SEQ ID NO: 1, optionally wherein the amino acid substitution corresponds to Y1066R or Y1066K in SEQ ID NO: 1.

17. The modified BoNT polypeptide of any one of claims 1-16, wherein the modified receptor binding domain comprises an amino acid substitution at a position corresponding to 1145 in SEQ ID NO: 1, optionally wherein the amino acid substitution corresponds to T1145Y in SEQ ID NO: 1.

18. The modified BoNT polypeptide of any one of claims 1-17, wherein the modified receptor binding domain comprises an amino acid substitution at a position corresponding to 1156 in SEQ ID NO: 1, optionally wherein the amino acid substitution corresponds to R1156M or R1156I in SEQ ID NO: 1.

19. The modified BoNT polypeptide of any one of claims 1-18, wherein the modified receptor binding domain comprises an amino acid substitution at a position corresponding to 1232 in SEQ ID NO: 1, optionally wherein the amino acid substitution corresponds to T1232R or T1232K in SEQ ID NO: 1.

20. The modified BoNT polypeptide of any one of claims 1-19, wherein the modified receptor binding domain comprises an amino acid substitution at a position corresponding to 1272 in SEQ ID NO: 1, optionally wherein the amino acid substitution corresponds to E1272G in SEQ ID NO: 1.

21. The modified BoNT polypeptide of any one of claims 1-20, wherein the modified receptor binding domain comprises an amino acid substitution at a position corresponding to 1278 in SEQ ID NO: 1, optionally wherein the amino acid substitution corresponds to L1278F, L1278Y, or L1278W in SEQ ID NO: 1.

22. The modified BoNT polypeptide of any one of claims 1-21, wherein the modified receptor binding domain comprises an amino acid substitution at a position corresponding to 1288 in SEQ ID NO: 1, optionally wherein the amino acid substitution corresponds to D1288E or D1288N in SEQ ID NO: 1.

23. The modified BoNT polypeptide of any one of claims 1-22, wherein the modified receptor binding domain comprises an amino acid substitution at a position corresponding to 1289 in SEQ ID NO: 1, optionally wherein the amino acid substitution corresponds to D1289Y in SEQ ID NO: 1.

24. The modified BoNT polypeptide of any one of claims 1-23, wherein the modified receptor binding domain comprises an amino acid substitution at a position corresponding to 1292 in SEQ ID NO: 1, optionally wherein the amino acid substitution corresponds to G1292R or G1292K in SEQ ID NO: 1.

25. The modified BoNT polypeptide of any one of claims 1-24, wherein the modified receptor binding domain comprises an amino acid substitution at a position corresponding to 1294 in SEQ ID NO: 1, optionally wherein the amino acid substitution corresponds to R1294S or R1294T in SEQ ID NO: 1.

26. The modified BoNT polypeptide of any one of claims 1-25, wherein the modified receptor binding domain comprises an amino acid substitution at a position corresponding to 1295 in SEQ ID NO: 1, optionally wherein the amino acid substitution corresponds to P1295S or P1295T in SEQ ID NO: 1.

27. The modified BoNT polypeptide of any one of claims 1-26, wherein the modified receptor binding domain comprises an amino acid sequence that is at least 80% identical to the amino acid sequence of SEQ ID NO: 51-85

28. The modified BoNT polypeptide of claim 27, wherein the modified receptor binding domain comprises the amino acid sequence of any one of SEQ ID NOs:51-85.

29. The modified BoNT polypeptide of any one of claims 1-28, further comprising a protease domain and a translocation domain from BoNT/A1.

30. The modified BoNT polypeptide of claim 29, wherein the modified BoNT polypeptide comprises an amino acid sequence that is at least 80% identical to the amino acid sequence of SEQ ID NO: 3-37.

31. The modified BoNT polypeptide of claim 30, wherein the modified BoNT polypeptide comprises the amino acid sequence of SEQ ID NO: 3-37.

32. The modified BoNT polypeptide of any one of claims 1-31, further comprising a protease domain and a translocation domain from a second BoNT, optionally wherein the second BoNT is of serotype B, C, D, E, F, G, H, X, or En.

33. The modified BoNT polypeptide of claim 32, wherein the modified BoNT polypeptide comprises an amino acid sequence that is at least 80% identical to the amino acid sequence of any one of SEQ ID NO: 97-105 fused to any one of SEQ ID NO: 51-85.

34. The modified BoNT polypeptide of claim 33, wherein the modified BoNT polypeptide comprises the amino acid sequence of any one of SEQ ID NO: 97-105 fused to any one of SEQ ID NO: 51-85.

35. A modified Clostridial Botulinum neurotoxin (BoNT) polypeptide comprising a modified receptor binding domain of Clostridial Botulinum serotype A2 (BoNT/A2) comprising one or more amino acid substitutions at positions corresponding to 915, 923, 1090, 1103, 1117, 1156, 1170, 1227, 1254, 1255, or 1256 in SEQ ID NO: 2.

36. The modified BoNT polypeptide of claim 35, wherein the modified receptor binding domain comprises an amino acid substitution at a position corresponding to 915 in SEQ ID NO: 2, optionally wherein the amino acid substitution corresponds to K915Q in SEQ ID NO: 2.

37. The modified BoNT polypeptide of claim 35 or claim 36, wherein the modified receptor binding domain comprises an amino acid substitution at a position corresponding to 923 in SEQ ID NO: 2, optionally wherein the amino acid substitution corresponds to T923K in SEQ ID NO: 2.

38. The modified BoNT polypeptide of anyone of claims 35-37, wherein the modified receptor binding domain comprises an amino acid substitution at a position corresponding to 1090 in SEQ ID NO: 2, optionally wherein the amino acid substitution corresponds to S1090N in SEQ ID NO: 2.

39. The modified BoNT polypeptide of anyone of claims 35-38, wherein the modified receptor binding domain comprises an amino acid substitution at a position corresponding to 1103 in SEQ ID NO: 2, optionally wherein the amino acid substitution corresponds to N1103D in SEQ ID NO: 2.

40. The modified BoNT polypeptide of anyone of claims 35-39, wherein the modified receptor binding domain comprises an amino acid substitution at a position corresponding to 1117 in SEQ ID NO: 2, optionally wherein the amino acid substitution corresponds to F1117Y in SEQ ID NO: 2.

41. The modified BoNT polypeptide of anyone of claims 35-40, wherein the modified receptor binding domain comprises an amino acid substitution at a position corresponding to 1156 in SEQ ID NO: 2, optionally wherein the amino acid substitution corresponds to E1156M in SEQ ID NO: 2.

42. The modified BoNT polypeptide of anyone of claims 35-41, wherein the modified receptor binding domain comprises an amino acid substitution at a position corresponding to 1170 in SEQ ID NO: 2, optionally wherein the amino acid substitution corresponds to E1170K in SEQ ID NO: 2.

43. The modified BoNT polypeptide of anyone of claims 35-42, wherein the modified receptor binding domain comprises an amino acid substitution at a position corresponding to 1227 in SEQ ID NO: 2, optionally wherein the amino acid substitution corresponds to D1227N in SEQ ID NO: 2.

44. The modified BoNT polypeptide of anyone of claims 35-43, wherein the modified receptor binding domain comprises an amino acid substitution at a position corresponding to 1254 in SEQ ID NO: 2, optionally wherein the amino acid substitution corresponds to L1254Q in SEQ ID NO: 2.

45. The modified BoNT polypeptide of anyone of claims 35-44, wherein the modified receptor binding domain comprises an amino acid substitution at a position corresponding to 1255 in SEQ ID NO: 2, optionally wherein the amino acid substitution corresponds to Y1255F in SEQ ID NO: 2.

46. The modified BoNT polypeptide of anyone of claims 35-45, wherein the modified receptor binding domain comprises an amino acid substitution at a position corresponding to 1256 in SEQ ID NO: 2, optionally wherein the amino acid substitution corresponds to D1256N in SEQ ID NO: 2.

47. The modified BoNT polypeptide of any one of claims 35-46, wherein the modified receptor binding domain comprises an amino acid sequence that is at least 80% identical to the amino acid sequence of SEQ ID NO: 86-96.

48. The modified BoNT polypeptide of claim 47, wherein the modified receptor binding domain comprises the amino acid sequence of any one of SEQ ID NOs: 86-96.

49. The modified BoNT polypeptide of any one of claims 35-48, further comprising a protease domain and a translocation domain from BoNT/A1.

50. The modified BoNT polypeptide of claim 49, wherein the modified BoNT polypeptide comprises an amino acid sequence that is at least 80% identical to the amino acid sequence of SEQ ID NO: 38-48.

51. The modified BoNT polypeptide of claim 50, wherein the modified BoNT polypeptide comprises the amino acid sequence of SEQ ID NO: 38-48.

52. The modified BoNT polypeptide of any one of claims 35-48, further comprising a protease domain and a translocation domain from a second BoNT, optionally wherein the second BoNT is of serotype B, C, D, E, F, G, H, X, or En.

53. The modified BoNT polypeptide of claim 52, wherein the modified BoNT polypeptide comprises an amino acid sequence that is at least 80% identical to the amino acid sequence of any one of SEQ ID NO: 97-105 fused to any one of SEQ ID NO: 86-96.

54. The modified BoNT polypeptide of claim 53, wherein the modified BoNT polypeptide comprises the amino acid sequence of any one of SEQ ID NO: 97-105 fused to any one of SEQ ID NO: 86-96.

55. A nucleic acid molecule comprising a polynucleotide encoding a modified BoNT polypeptide of any one of claims 1-34 and 35-54.

56. A nucleic acid vector comprising the nucleic acid molecule of claim 55.

57. A cell comprising the nucleic acid molecule of claim 55 or the nucleic acid vector of claim 56.

58. A cell expressing the modified BoNT polypeptide of any one of claims 1-34 and 35-54.

59. A method of producing a modified BoNT polypeptide, the method comprising the steps of culturing the cell of claim 57 or claim 58 under conditions wherein the modified BoNT polypeptide is produced.

60. The method of claim 59, further comprising recovering the modified BoNT polypeptide from the culture.

61. A pharmaceutical composition comprising the modified BoNT polypeptide of any one of claims 1-34 and 35-54.

62. The pharmaceutical composition of claim 61, further comprising a pharmaceutically acceptable excipient.

63. A kit comprising a pharmaceutical composition of claim 61 or claim 62 and directions for therapeutic administration of the pharmaceutical composition.

64. A method of treating a condition, the method comprising administering a therapeutically effective amount of the modified BoNT polypeptide of any one of claims 1-34 and 35-54, or the pharmaceutical composition of or claim 61 or 62 to a subject to treat the condition.

65. The method of claim 64, wherein the condition is associated with overactive neurons or glands.

66. The method of claim 65, wherein the condition is selected from the group consisting of: spasmodic dysphonia, spasmodic torticollis, laryngeal dystonia, oromandibular dysphonia, lingual dystonia, cervical dystonia, focal hand dystonia, blepharospasm, strabismus, hemifacial spasm, eyelid disorder, cerebral palsy, focal spasticity and other voice disorders, spasmodic colitis, neurogenic bladder, anismus, limb spasticity, tics, tremors, bruxism, anal fissure, achalasia, dysphagia and other muscle tone disorders and other disorders characterized by involuntary movements of muscle groups, lacrimation, hyperhydrosis, excessive salivation, excessive gastrointestinal secretions, secretory disorders, pain from muscle spasms, headache pain, dermatological or aesthetic/cosmetic conditions, obesity/reduced appetite, depression.

67. The method of claim 64 or 65, wherein the condition is not associated with unwanted neuronal activity.

68. The method of claim 67, wherein the condition is selected from the group consisting of: psoriasis, allergy, haemophagocytic lymphohistiocytosis, and alcoholic pancreatic disease.

69. The method of any one of any one of claims 64-68, wherein the administering is via injection to where unwanted neuronal activity is present.

70. The modified BoNT polypeptide of any one of claims 1-34 and 35-54, or the pharmaceutical composition of claim 61 or 62, for use in treating a condition associated with unwanted neuronal activity.

71. The modified BoNT polypeptide of any one of claims 1-34 and 35-54, or the pharmaceutical composition of claim 61 or 62, for use in medicine.

72. The modified BoNT polypeptide of any one of claims 1-34 and 35-54, or the pharmaceutical composition of claim 61 or 62, for cosmetic use.

The application's sequence listing, which the Patent Office published only in electronic form, follows.

SEQUENCE LISTING (126 sequences)

SEQ ID NO: 1 - protein, 1296 aa, Clostridium botulinum
MPFVNKQFNYKDPVNGVDIAYIKIPNAGQMQPVKAFKIHNKIWVIPERDTFTNPEEGDLNPPPEAKQVPVSYYDSTYLSTDNEKDNYLKGVTKLFERIYSTDLGRMLLTSIVRGIPFWGGSTIDTELKVIDTNCINVIQPDGSYRSEELNLVIIGPSADIIQFECKSFGHEVLNLTRNGYGSTQYIRFSPDFTFGFEESLEVDTNPLLGAGKFATDPAVTLAHELIHAGHRLYGIAINPNRVFKVNTNAYYEMSGLEVSFEELRTFGGHDAKFIDSLQENEFRLYYYNKFKDIASTLNKAKSIVGTTASLQYMKNVFKEKYLLSEDTSGKFSVDKLKFDKLYKMLTEIYTEDNFVKFFKVLNRKTYLNFDKAVFKINIVPKVNYTIYDGFNLRNTNLAANFNGQNTEINNMNFTKLKNFTGLFEFYKLLCVRGIITSKTKSLDKGYNKALNDLCIKVNNWDLFFSPSEDNFTNDLNKGEEITSDTNIEAAEENISLDLIQQYYLTFNFDNEPENISIENLSSDIIGQLELMPNIERFPNGKKYELDKYTMFHYLRAQEFEHGKSRIALTNSVNEALLNPSRVYTFFSSDYVKKVNKATEAAMFLGWVEQLVYDFTDETSEVSTTDKIADITIIIPYIGPALNIGNMLYKDDFVGALIFSGAVILLEFIPEIAIPVLGTFALVSYIANKVLTVQTIDNALSKRNEKWDEVYKYIVTNWLAKVNTQIDLIRKKMKEALENQAEATKAIINYQYNQYTEEEKNNINFNIDDLSSKLNESINKAMININKFLNQCSVSYLMNSMIPYGVKRLEDFDASLKDALLKYIYDNRGTLIGQVDRLKDKVNNTLSTDIPFQLSKYVDNQRLLSTFTEYIKNIINTSILNLRYESNHLIDLSRYASKINIGSKVNFDPIDKNQIQLFNLESSKIEVILKNAIVYNSMYENFSTSFWIRIPKYFNSISLNNEYTIINCMENNSGWKVSLNYGEIIWTLQDTQEIKQRVVFKYSQMINISDYINRWIFVTITNNRLNNSKIYINGRLIDQKPISNLGNIHASNNIMFKLDGCRDTHRYIWIKYFNLFDKELNEKEIKDLYDNQSNSGILKDFWGDYLQYDKPYYMLNLYDPNKYVDVNNVGIRGYMYLKGPRGSVMTTNIYLNSSLYRGTKFIIKKYASGNKDNIVRNNDRVYINVVVKNKEYRLATNASQAGVEKILSALEIPDVGNLSQVVVMKSKNDQGITNKCKMNLQDNNGNDIGFIGFHQFNNIAKLVASNWYNRQIERSSRTLGCSWEFIPVDDGWGERPL

SEQ ID NO: 2 - protein, 1296 aa, Clostridium botulinum
MPFVNKQFNYKDPVNGVDIAYIKIPNAGQMQPVKAFKIHNKIWVIPERDTFTNPEEGDLNPPPEAKQVPVSYYDSTYLSTDNEKDNYLKGVTKLFERIYSTDLGRMLLTSIVRGIPFWGGSTIDTELKVIDTNCINVIQPDGSYRSEELNLVIIGPSADIIQFECKSFGHDVLNLTRNGYGSTQYIRFSPDFTFGFEESLEVDTNPLLGAGKFATDPAVTLAHELIHAEHRLYGIAINPNRVFKVNTNAYYEMSGLEVSFEELRTFGGHDAKFIDSLQENEFRLYYYNKFKDVASTLNKAKSIIGTTASLQYMKNVFKEKYLLSEDTSGKFSVDKLKFDKLYKMLTEIYTEDNFVNFFKVINRKTYLNFDKAVFRINIVPDENYTIKDGFNLKGANLSTNFNGQNTEINSRNFTRLKNFTGLFEFYKLLCVRGIIPFKTKSLDEGYNKALNDLCIKVNNWDLFFSPSEDNFTNDLDKVEEITADTNIEAAEENISLDLIQQYYLTFDFDNEPENISIENLSSDIIGQLEPMPNIERFPNGKKYELDKYTMFHYLRAQEFEHGDSRIILTNSAEEALLKPNVAYTFFSSKYVKKINKAVEAFMFLNWAEELVYDFTDETNEVTTMDKIADITIIVPYIGPALNIGNMLSKGEFVEAIIFTGVVAMLEFIPEYALPVFGTFAIVSYIANKVLTVQTINNALSKRNEKWDEVYKYTVTNWLAKVNTQIDLIREKMKKALENQAEATKAIINYQYNQYTEEEKNNINFNIDDLSSKLNESINSAMININKFLDQCSVSYLMNSMIPYAVKRLKDFDASVRDVLLKYIYDNRGTLVLQVDRLKDEVNNTLSADIPFQLSKYVDNKKLLSTFTEYIKNIVNTSILSIVYKKDDLIDLSRYGAKINIGDRVYYDSIDKNQIKLINLESSTIEVILKNAIVYNSMYENFSTSFWIKIPKYFSKINLNNEYTIINCIENNSGWKVSLNYGEIIWTLQDNKQNIQRVVFKYSQMVNISDYINRWIFVTITNNRLTKSKIYINGRLIDQKPISNLGNIHASNKIMFKLDGCRDPRRYIMIKYFNLFDKELNEKEIKDLYDSQSNSGILKDFWGNYLQYDKPYYMLNLFDPNKYVDVNNIGIRGYMYLKGPRGSVVTTNIYLNSTLYEGTKFIIKKYASGNEDNIVRNNDRVYINVVVKNKEYRLATNASQAGVEKILSALEIPDVGNLSQVVVMKSKDDQGIRNKCKMNLQDNNGNDIGFIGFHLYDNIAKLVASNWYNRQVGKASRTFGCSWEFIPVDDGWGESSL

SEQ ID NO: 3 - protein, 1296 aa, Artificial Sequence
  Synthetic
MPFVNKQFNYKDPVNGVDIAYIKIPNAGQMQPVKAFKIHNKIWVIPERDTFTNPEEGDLNPPPEAKQVPVSYYDSTYLSTDNEKDNYLKGVTKLFERIYSTDLGRMLLTSIVRGIPFWGGSTIDTELKVIDTNCINVIQPDGSYRSEELNLVIIGPSADIIQFECKSFGHEVLNLTRNGYGSTQYIRFSPDFTFGFEESLEVDTNPLLGAGKFATDPAVTLAHELIHAGHRLYGIAINPNRVFKVNTNAYYEMSGLEVSFEELRTFGGHDAKFIDSLQENEFRLYYYNKFKDIASTLNKAKSIVGTTASLQYMKNVFKEKYLLSEDTSGKFSVDKLKFDKLYKMLTEIYTEDNFVKFFKVLNRKTYLNFDKAVFKINIVPKVNYTIYDGFNLRNTNLAANFNGQNTEINNMNFTKLKNFTGLFEFYKLLCVRGIITSKTKSLDKGYNKALNDLCIKVNNWDLFFSPSEDNFTNDLNKGEEITSDTNIEAAEENISLDLIQQYYLTFNFDNEPENISIENLSSDIIGQLELMPNIERFPNGKKYELDKYTMFHYLRAQEFEHGKSRIALTNSVNEALLNPSRVYTFFSSDYVKKVNKATEAAMFLGWVEQLVYDFTDETSEVSTTDKIADITIIIPYIGPALNIGNMLYKDDFVGALIFSGAVILLEFIPEIAIPVLGTFALVSYIANKVLTVQTIDNALSKRNEKWDEVYKYIVTNWLAKVNTQIDLIRKKMKEALENQAEATKAIINYQYNQYTEEEKNNINFNIDDLSSKLNESINKAMININKFLNQCSVSYLMNSMIPYGVKRLEDFDASLKDALLKYIYDNRGTLIGQVDRLKDKVNNTLSTDIPFQLSKYVDNQRLLSTFTEYIKNIINTSILNLRYESNHLIDLSRYASKINIGSKVNFDPIDKNQIQLRNLESSKIEVILKNAIVYNSMYENFSTSFWIRIPKYFNSISLNNEYTIINCMENNSGWKVSLNYGEIIWTLQDTQEIKQRVVFKYSQMINISDYINRWIFVTITNNRLNNSKIYINGRLIDQKPISNLGNIHASNNIMFKLDGCRDTHRYIWIKYFNLFDKELNEKEIKDLYDNQSNSGILKDFWGDYLQYDKPYYMLNLYDPNKYVDVNNVGIRGYMYLKGPRGSVMTTNIYLNSSLYRGTKFIIKKYASGNKDNIVRNNDRVYINVVVKNKEYRLATNASQAGVEKILSALEIPDVGNLSQVVVMKSKNDQGITNKCKMNLQDNNGNDIGFIGFHQFNNIAKLVASNWYNRQIERSSRTLGCSWEFIPVDDGWGERPL

SEQ ID NO: 4 - protein, 1296 aa, Artificial Sequence
  Synthetic
MPFVNKQFNYKDPVNGVDIAYIKIPNAGQMQPVKAFKIHNKIWVIPERDTFTNPEEGDLNPPPEAKQVPVSYYDSTYLSTDNEKDNYLKGVTKLFERIYSTDLGRMLLTSIVRGIPFWGGSTIDTELKVIDTNCINVIQPDGSYRSEELNLVIIGPSADIIQFECKSFGHEVLNLTRNGYGSTQYIRFSPDFTFGFEESLEVDTNPLLGAGKFATDPAVTLAHELIHAGHRLYGIAINPNRVFKVNTNAYYEMSGLEVSFEELRTFGGHDAKFIDSLQENEFRLYYYNKFKDIASTLNKAKSIVGTTASLQYMKNVFKEKYLLSEDTSGKFSVDKLKFDKLYKMLTEIYTEDNFVKFFKVLNRKTYLNFDKAVFKINIVPKVNYTIYDGFNLRNTNLAANFNGQNTEINNMNFTKLKNFTGLFEFYKLLCVRGIITSKTKSLDKGYNKALNDLCIKVNNWDLFFSPSEDNFTNDLNKGEEITSDTNIEAAEENISLDLIQQYYLTFNFDNEPENISIENLSSDIIGQLELMPNIERFPNGKKYELDKYTMFHYLRAQEFEHGKSRIALTNSVNEALLNPSRVYTFFSSDYVKKVNKATEAAMFLGWVEQLVYDFTDETSEVSTTDKIADITIIIPYIGPALNIGNMLYKDDFVGALIFSGAVILLEFIPEIAIPVLGTFALVSYIANKVLTVQTIDNALSKRNEKWDEVYKYIVTNWLAKVNTQIDLIRKKMKEALENQAEATKAIINYQYNQYTEEEKNNINFNIDDLSSKLNESINKAMININKFLNQCSVSYLMNSMIPYGVKRLEDFDASLKDALLKYIYDNRGTLIGQVDRLKDKVNNTLSTDIPFQLSKYVDNQRLLSTFTEYIKNIINTSILNLRYESNHLIDLSRYASKINIGSKVNFDPIDKNQIQLKNLESSKIEVILKNAIVYNSMYENFSTSFWIRIPKYFNSISLNNEYTIINCMENNSGWKVSLNYGEIIWTLQDTQEIKQRVVFKYSQMINISDYINRWIFVTITNNRLNNSKIYINGRLIDQKPISNLGNIHASNNIMFKLDGCRDTHRYIWIKYFNLFDKELNEKEIKDLYDNQSNSGILKDFWGDYLQYDKPYYMLNLYDPNKYVDVNNVGIRGYMYLKGPRGSVMTTNIYLNSSLYRGTKFIIKKYASGNKDNIVRNNDRVYINVVVKNKEYRLATNASQAGVEKILSALEIPDVGNLSQVVVMKSKNDQGITNKCKMNLQDNNGNDIGFIGFHQFNNIAKLVASNWYNRQIERSSRTLGCSWEFIPVDDGWGERPL

SEQ ID NO: 5 - protein, 1296 aa, Artificial Sequence
  Synthetic
MPFVNKQFNYKDPVNGVDIAYIKIPNAGQMQPVKAFKIHNKIWVIPERDTFTNPEEGDLNPPPEAKQVPVSYYDSTYLSTDNEKDNYLKGVTKLFERIYSTDLGRMLLTSIVRGIPFWGGSTIDTELKVIDTNCINVIQPDGSYRSEELNLVIIGPSADIIQFECKSFGHEVLNLTRNGYGSTQYIRFSPDFTFGFEESLEVDTNPLLGAGKFATDPAVTLAHELIHAGHRLYGIAINPNRVFKVNTNAYYEMSGLEVSFEELRTFGGHDAKFIDSLQENEFRLYYYNKFKDIASTLNKAKSIVGTTASLQYMKNVFKEKYLLSEDTSGKFSVDKLKFDKLYKMLTEIYTEDNFVKFFKVLNRKTYLNFDKAVFKINIVPKVNYTIYDGFNLRNTNLAANFNGQNTEINNMNFTKLKNFTGLFEFYKLLCVRGIITSKTKSLDKGYNKALNDLCIKVNNWDLFFSPSEDNFTNDLNKGEEITSDTNIEAAEENISLDLIQQYYLTFNFDNEPENISIENLSSDIIGQLELMPNIERFPNGKKYELDKYTMFHYLRAQEFEHGKSRIALTNSVNEALLNPSRVYTFFSSDYVKKVNKATEAAMFLGWVEQLVYDFTDETSEVSTTDKIADITIIIPYIGPALNIGNMLYKDDFVGALIFSGAVILLEFIPEIAIPVLGTFALVSYIANKVLTVQTIDNALSKRNEKWDEVYKYIVTNWLAKVNTQIDLIRKKMKEALENQAEATKAIINYQYNQYTEEEKNNINFNIDDLSSKLNESINKAMININKFLNQCSVSYLMNSMIPYGVKRLEDFDASLKDALLKYIYDNRGTLIGQVDRLKDKVNNTLSTDIPFQLSKYVDNQRLLSTFTEYIKNIINTSILNLRYESNHLIDLSRYASKINIGSKVNFDPIDKNQIQLFNLESSKIEVILKNAIVYNSMYENFSTSFWIRIPKYHNSISLNNEYTIINCMENNSGWKVSLNYGEIIWTLQDTQEIKQRVVFKYSQMINISDYINRWIFVTITNNRLNNSKIYINGRLIDQKPISNLGNIHASNNIMFKLDGCRDTHRYIWIKYFNLFDKELNEKEIKDLYDNQSNSGILKDFWGDYLQYDKPYYMLNLYDPNKYVDVNNVGIRGYMYLKGPRGSVMTTNIYLNSSLYRGTKFIIKKYASGNKDNIVRNNDRVYINVVVKNKEYRLATNASQAGVEKILSALEIPDVGNLSQVVVMKSKNDQGITNKCKMNLQDNNGNDIGFIGFHQFNNIAKLVASNWYNRQIERSSRTLGCSWEFIPVDDGWGERPL

SEQ ID NO: 6 - protein, 1296 aa, Artificial Sequence
  Synthetic
MPFVNKQFNYKDPVNGVDIAYIKIPNAGQMQPVKAFKIHNKIWVIPERDTFTNPEEGDLNPPPEAKQVPVSYYDSTYLSTDNEKDNYLKGVTKLFERIYSTDLGRMLLTSIVRGIPFWGGSTIDTELKVIDTNCINVIQPDGSYRSEELNLVIIGPSADIIQFECKSFGHEVLNLTRNGYGSTQYIRFSPDFTFGFEESLEVDTNPLLGAGKFATDPAVTLAHELIHAGHRLYGIAINPNRVFKVNTNAYYEMSGLEVSFEELRTFGGHDAKFIDSLQENEFRLYYYNKFKDIASTLNKAKSIVGTTASLQYMKNVFKEKYLLSEDTSGKFSVDKLKFDKLYKMLTEIYTEDNFVKFFKVLNRKTYLNFDKAVFKINIVPKVNYTIYDGFNLRNTNLAANFNGQNTEINNMNFTKLKNFTGLFEFYKLLCVRGIITSKTKSLDKGYNKALNDLCIKVNNWDLFFSPSEDNFTNDLNKGEEITSDTNIEAAEENISLDLIQQYYLTFNFDNEPENISIENLSSDIIGQLELMPNIERFPNGKKYELDKYTMFHYLRAQEFEHGKSRIALTNSVNEALLNPSRVYTFFSSDYVKKVNKATEAAMFLGWVEQLVYDFTDETSEVSTTDKIADITIIIPYIGPALNIGNMLYKDDFVGALIFSGAVILLEFIPEIAIPVLGTFALVSYIANKVLTVQTIDNALSKRNEKWDEVYKYIVTNWLAKVNTQIDLIRKKMKEALENQAEATKAIINYQYNQYTEEEKNNINFNIDDLSSKLNESINKAMININKFLNQCSVSYLMNSMIPYGVKRLEDFDASLKDALLKYIYDNRGTLIGQVDRLKDKVNNTLSTDIPFQLSKYVDNQRLLSTFTEYIKNIINTSILNLRYESNHLIDLSRYASKINIGSKVNFDPIDKNQIQLFNLESSKIEVILKNAIVYNSMYENFSTSFWIRIPKYYNSISLNNEYTIINCMENNSGWKVSLNYGEIIWTLQDTQEIKQRVVFKYSQMINISDYINRWIFVTITNNRLNNSKIYINGRLIDQKPISNLGNIHASNNIMFKLDGCRDTHRYIWIKYFNLFDKELNEKEIKDLYDNQSNSGILKDFWGDYLQYDKPYYMLNLYDPNKYVDVNNVGIRGYMYLKGPRGSVMTTNIYLNSSLYRGTKFIIKKYASGNKDNIVRNNDRVYINVVVKNKEYRLATNASQAGVEKILSALEIPDVGNLSQVVVMKSKNDQGITNKCKMNLQDNNGNDIGFIGFHQFNNIAKLVASNWYNRQIERSSRTLGCSWEFIPVDDGWGERPL

SEQ ID NO: 7 - protein, 1296 aa, Artificial Sequence
  Synthetic
MPFVNKQFNYKDPVNGVDIAYIKIPNAGQMQPVKAFKIHNKIWVIPERDTFTNPEEGDLNPPPEAKQVPVSYYDSTYLSTDNEKDNYLKGVTKLFERIYSTDLGRMLLTSIVRGIPFWGGSTIDTELKVIDTNCINVIQPDGSYRSEELNLVIIGPSADIIQFECKSFGHEVLNLTRNGYGSTQYIRFSPDFTFGFEESLEVDTNPLLGAGKFATDPAVTLAHELIHAGHRLYGIAINPNRVFKVNTNAYYEMSGLEVSFEELRTFGGHDAKFIDSLQENEFRLYYYNKFKDIASTLNKAKSIVGTTASLQYMKNVFKEKYLLSEDTSGKFSVDKLKFDKLYKMLTEIYTEDNFVKFFKVLNRKTYLNFDKAVFKINIVPKVNYTIYDGFNLRNTNLAANFNGQNTEINNMNFTKLKNFTGLFEFYKLLCVRGIITSKTKSLDKGYNKALNDLCIKVNNWDLFFSPSEDNFTNDLNKGEEITSDTNIEAAEENISLDLIQQYYLTFNFDNEPENISIENLSSDIIGQLELMPNIERFPNGKKYELDKYTMFHYLRAQEFEHGKSRIALTNSVNEALLNPSRVYTFFSSDYVKKVNKATEAAMFLGWVEQLVYDFTDETSEVSTTDKIADITIIIPYIGPALNIGNMLYKDDFVGALIFSGAVILLEFIPEIAIPVLGTFALVSYIANKVLTVQTIDNALSKRNEKWDEVYKYIVTNWLAKVNTQIDLIRKKMKEALENQAEATKAIINYQYNQYTEEEKNNINFNIDDLSSKLNESINKAMININKFLNQCSVSYLMNSMIPYGVKRLEDFDASLKDALLKYIYDNRGTLIGQVDRLKDKVNNTLSTDIPFQLSKYVDNQRLLSTFTEYIKNIINTSILNLRYESNHLIDLSRYASKINIGSKVNFDPIDKNQIQLFNLESSKIEVILKNAIVYNSMYENFSTSFWIRIPKYFSSISLNNEYTIINCMENNSGWKVSLNYGEIIWTLQDTQEIKQRVVFKYSQMINISDYINRWIFVTITNNRLNNSKIYINGRLIDQKPISNLGNIHASNNIMFKLDGCRDTHRYIWIKYFNLFDKELNEKEIKDLYDNQSNSGILKDFWGDYLQYDKPYYMLNLYDPNKYVDVNNVGIRGYMYLKGPRGSVMTTNIYLNSSLYRGTKFIIKKYASGNKDNIVRNNDRVYINVVVKNKEYRLATNASQAGVEKILSALEIPDVGNLSQVVVMKSKNDQGITNKCKMNLQDNNGNDIGFIGFHQFNNIAKLVASNWYNRQIERSSRTLGCSWEFIPVDDGWGERPL

SEQ ID NO: 8 - protein, 1296 aa, Artificial Sequence
  Synthetic
MPFVNKQFNYKDPVNGVDIAYIKIPNAGQMQPVKAFKIHNKIWVIPERDTFTNPEEGDLNPPPEAKQVPVSYYDSTYLSTDNEKDNYLKGVTKLFERIYSTDLGRMLLTSIVRGIPFWGGSTIDTELKVIDTNCINVIQPDGSYRSEELNLVIIGPSADIIQFECKSFGHEVLNLTRNGYGSTQYIRFSPDFTFGFEESLEVDTNPLLGAGKFATDPAVTLAHELIHAGHRLYGIAINPNRVFKVNTNAYYEMSGLEVSFEELRTFGGHDAKFIDSLQENEFRLYYYNKFKDIASTLNKAKSIVGTTASLQYMKNVFKEKYLLSEDTSGKFSVDKLKFDKLYKMLTEIYTEDNFVKFFKVLNRKTYLNFDKAVFKINIVPKVNYTIYDGFNLRNTNLAANFNGQNTEINNMNFTKLKNFTGLFEFYKLLCVRGIITSKTKSLDKGYNKALNDLCIKVNNWDLFFSPSEDNFTNDLNKGEEITSDTNIEAAEENISLDLIQQYYLTFNFDNEPENISIENLSSDIIGQLELMPNIERFPNGKKYELDKYTMFHYLRAQEFEHGKSRIALTNSVNEALLNPSRVYTFFSSDYVKKVNKATEAAMFLGWVEQLVYDFTDETSEVSTTDKIADITIIIPYIGPALNIGNMLYKDDFVGALIFSGAVILLEFIPEIAIPVLGTFALVSYIANKVLTVQTIDNALSKRNEKWDEVYKYIVTNWLAKVNTQIDLIRKKMKEALENQAEATKAIINYQYNQYTEEEKNNINFNIDDLSSKLNESINKAMININKFLNQCSVSYLMNSMIPYGVKRLEDFDASLKDALLKYIYDNRGTLIGQVDRLKDKVNNTLSTDIPFQLSKYVDNQRLLSTFTEYIKNIINTSILNLRYESNHLIDLSRYASKINIGSKVNFDPIDKNQIQLFNLESSKIEVILKNAIVYNSMYENFSTSFWIRIPKYFNKISLNNEYTIINCMENNSGWKVSLNYGEIIWTLQDTQEIKQRVVFKYSQMINISDYINRWIFVTITNNRLNNSKIYINGRLIDQKPISNLGNIHASNNIMFKLDGCRDTHRYIWIKYFNLFDKELNEKEIKDLYDNQSNSGILKDFWGDYLQYDKPYYMLNLYDPNKYVDVNNVGIRGYMYLKGPRGSVMTTNIYLNSSLYRGTKFIIKKYASGNKDNIVRNNDRVYINVVVKNKEYRLATNASQAGVEKILSALEIPDVGNLSQVVVMKSKNDQGITNKCKMNLQDNNGNDIGFIGFHQFNNIAKLVASNWYNRQIERSSRTLGCSWEFIPVDDGWGERPL

SEQ ID NO: 9 - protein, 1296 aa, Artificial Sequence
  Synthetic
MPFVNKQFNYKDPVNGVDIAYIKIPNAGQMQPVKAFKIHNKIWVIPERDTFTNPEEGDLNPPPEAKQVPVSYYDSTYLSTDNEKDNYLKGVTKLFERIYSTDLGRMLLTSIVRGIPFWGGSTIDTELKVIDTNCINVIQPDGSYRSEELNLVIIGPSADIIQFECKSFGHEVLNLTRNGYGSTQYIRFSPDFTFGFEESLEVDTNPLLGAGKFATDPAVTLAHELIHAGHRLYGIAINPNRVFKVNTNAYYEMSGLEVSFEELRTFGGHDAKFIDSLQENEFRLYYYNKFKDIASTLNKAKSIVGTTASLQYMKNVFKEKYLLSEDTSGKFSVDKLKFDKLYKMLTEIYTEDNFVKFFKVLNRKTYLNFDKAVFKINIVPKVNYTIYDGFNLRNTNLAANFNGQNTEINNMNFTKLKNFTGLFEFYKLLCVRGIITSKTKSLDKGYNKALNDLCIKVNNWDLFFSPSEDNFTNDLNKGEEITSDTNIEAAEENISLDLIQQYYLTFNFDNEPENISIENLSSDIIGQLELMPNIERFPNGKKYELDKYTMFHYLRAQEFEHGKSRIALTNSVNEALLNPSRVYTFFSSDYVKKVNKATEAAMFLGWVEQLVYDFTDETSEVSTTDKIADITIIIPYIGPALNIGNMLYKDDFVGALIFSGAVILLEFIPEIAIPVLGTFALVSYIANKVLTVQTIDNALSKRNEKWDEVYKYIVTNWLAKVNTQIDLIRKKMKEALENQAEATKAIINYQYNQYTEEEKNNINFNIDDLSSKLNESINKAMININKFLNQCSVSYLMNSMIPYGVKRLEDFDASLKDALLKYIYDNRGTLIGQVDRLKDKVNNTLSTDIPFQLSKYVDNQRLLSTFTEYIKNIINTSILNLRYESNHLIDLSRYASKINIGSKVNFDPIDKNQIQLFNLESSKIEVILKNAIVYNSMYENFSTSFWIRIPKYFNSINLNNEYTIINCMENNSGWKVSLNYGEIIWTLQDTQEIKQRVVFKYSQMINISDYINRWIFVTITNNRLNNSKIYINGRLIDQKPISNLGNIHASNNIMFKLDGCRDTHRYIWIKYFNLFDKELNEKEIKDLYDNQSNSGILKDFWGDYLQYDKPYYMLNLYDPNKYVDVNNVGIRGYMYLKGPRGSVMTTNIYLNSSLYRGTKFIIKKYASGNKDNIVRNNDRVYINVVVKNKEYRLATNASQAGVEKILSALEIPDVGNLSQVVVMKSKNDQGITNKCKMNLQDNNGNDIGFIGFHQFNNIAKLVASNWYNRQIERSSRTLGCSWEFIPVDDGWGERPL

SEQ ID NO: 10 - protein, 1296 aa, Artificial Sequence
  Synthetic
MPFVNKQFNYKDPVNGVDIAYIKIPNAGQMQPVKAFKIHNKIWVIPERDTFTNPEEGDLNPPPEAKQVPVSYYDSTYLSTDNEKDNYLKGVTKLFERIYSTDLGRMLLTSIVRGIPFWGGSTIDTELKVIDTNCINVIQPDGSYRSEELNLVIIGPSADIIQFECKSFGHEVLNLTRNGYGSTQYIRFSPDFTFGFEESLEVDTNPLLGAGKFATDPAVTLAHELIHAGHRLYGIAINPNRVFKVNTNAYYEMSGLEVSFEELRTFGGHDAKFIDSLQENEFRLYYYNKFKDIASTLNKAKSIVGTTASLQYMKNVFKEKYLLSEDTSGKFSVDKLKFDKLYKMLTEIYTEDNFVKFFKVLNRKTYLNFDKAVFKINIVPKVNYTIYDGFNLRNTNLAANFNGQNTEINNMNFTKLKNFTGLFEFYKLLCVRGIITSKTKSLDKGYNKALNDLCIKVNNWDLFFSPSEDNFTNDLNKGEEITSDTNIEAAEENISLDLIQQYYLTFNFDNEPENISIENLSSDIIGQLELMPNIERFPNGKKYELDKYTMFHYLRAQEFEHGKSRIALTNSVNEALLNPSRVYTFFSSDYVKKVNKATEAAMFLGWVEQLVYDFTDETSEVSTTDKIADITIIIPYIGPALNIGNMLYKDDFVGALIFSGAVILLEFIPEIAIPVLGTFALVSYIANKVLTVQTIDNALSKRNEKWDEVYKYIVTNWLAKVNTQIDLIRKKMKEALENQAEATKAIINYQYNQYTEEEKNNINFNIDDLSSKLNESINKAMININKFLNQCSVSYLMNSMIPYGVKRLEDFDASLKDALLKYIYDNRGTLIGQVDRLKDKVNNTLSTDIPFQLSKYVDNQRLLSTFTEYIKNIINTSILNLRYESNHLIDLSRYASKINIGSKVNFDPIDKNQIQLFNLESSKIEVILKNAIVYNSMYENFSTSFWIRIPKYFNSISLNNEYTIINCIENNSGWKVSLNYGEIIWTLQDTQEIKQRVVFKYSQMINISDYINRWIFVTITNNRLNNSKIYINGRLIDQKPISNLGNIHASNNIMFKLDGCRDTHRYIWIKYFNLFDKELNEKEIKDLYDNQSNSGILKDFWGDYLQYDKPYYMLNLYDPNKYVDVNNVGIRGYMYLKGPRGSVMTTNIYLNSSLYRGTKFIIKKYASGNKDNIVRNNDRVYINVVVKNKEYRLATNASQAGVEKILSALEIPDVGNLSQVVVMKSKNDQGITNKCKMNLQDNNGNDIGFIGFHQFNNIAKLVASNWYNRQIERSSRTLGCSWEFIPVDDGWGERPL

SEQ ID NO: 11 - protein, 1296 aa, Artificial Sequence
  Synthetic
MPFVNKQFNYKDPVNGVDIAYIKIPNAGQMQPVKAFKIHNKIWVIPERDTFTNPEEGDLNPPPEAKQVPVSYYDSTYLSTDNEKDNYLKGVTKLFERIYSTDLGRMLLTSIVRGIPFWGGSTIDTELKVIDTNCINVIQPDGSYRSEELNLVIIGPSADIIQFECKSFGHEVLNLTRNGYGSTQYIRFSPDFTFGFEESLEVDTNPLLGAGKFATDPAVTLAHELIHAGHRLYGIAINPNRVFKVNTNAYYEMSGLEVSFEELRTFGGHDAKFIDSLQENEFRLYYYNKFKDIASTLNKAKSIVGTTASLQYMKNVFKEKYLLSEDTSGKFSVDKLKFDKLYKMLTEIYTEDNFVKFFKVLNRKTYLNFDKAVFKINIVPKVNYTIYDGFNLRNTNLAANFNGQNTEINNMNFTKLKNFTGLFEFYKLLCVRGIITSKTKSLDKGYNKALNDLCIKVNNWDLFFSPSEDNFTNDLNKGEEITSDTNIEAAEENISLDLIQQYYLTFNFDNEPENISIENLSSDIIGQLELMPNIERFPNGKKYELDKYTMFHYLRAQEFEHGKSRIALTNSVNEALLNPSRVYTFFSSDYVKKVNKATEAAMFLGWVEQLVYDFTDETSEVSTTDKIADITIIIPYIGPALNIGNMLYKDDFVGALIFSGAVILLEFIPEIAIPVLGTFALVSYIANKVLTVQTIDNALSKRNEKWDEVYKYIVTNWLAKVNTQIDLIRKKMKEALENQAEATKAIINYQYNQYTEEEKNNINFNIDDLSSKLNESINKAMININKFLNQCSVSYLMNSMIPYGVKRLEDFDASLKDALLKYIYDNRGTLIGQVDRLKDKVNNTLSTDIPFQLSKYVDNQRLLSTFTEYIKNIINTSILNLRYESNHLIDLSRYASKINIGSKVNFDPIDKNQIQLFNLESSKIEVILKNAIVYNSMYENFSTSFWIRIPKYFNSISLNNEYTIINCMENNSGWKVSLNYGEIIWTLQDTQEIKQRVVFKYSQMINISDYINRWIFVTITNNRLTNSKIYINGRLIDQKPISNLGNIHASNNIMFKLDGCRDTHRYIWIKYFNLFDKELNEKEIKDLYDNQSNSGILKDFWGDYLQYDKPYYMLNLYDPNKYVDVNNVGIRGYMYLKGPRGSVMTTNIYLNSSLYRGTKFIIKKYASGNKDNIVRNNDRVYINVVVKNKEYRLATNASQAGVEKILSALEIPDVGNLSQVVVMKSKNDQGITNKCKMNLQDNNGNDIGFIGFHQFNNIAKLVASNWYNRQIERSSRTLGCSWEFIPVDDGWGERPL

SEQ ID NO: 12 - protein, 1296 aa, Artificial Sequence
  Synthetic
MPFVNKQFNYKDPVNGVDIAYIKIPNAGQMQPVKAFKIHNKIWVIPERDTFTNPEEGDLNPPPEAKQVPVSYYDSTYLSTDNEKDNYLKGVTKLFERIYSTDLGRMLLTSIVRGIPFWGGSTIDTELKVIDTNCINVIQPDGSYRSEELNLVIIGPSADIIQFECKSFGHEVLNLTRNGYGSTQYIRFSPDFTFGFEESLEVDTNPLLGAGKFATDPAVTLAHELIHAGHRLYGIAINPNRVFKVNTNAYYEMSGLEVSFEELRTFGGHDAKFIDSLQENEFRLYYYNKFKDIASTLNKAKSIVGTTASLQYMKNVFKEKYLLSEDTSGKFSVDKLKFDKLYKMLTEIYTEDNFVKFFKVLNRKTYLNFDKAVFKINIVPKVNYTIYDGFNLRNTNLAANFNGQNTEINNMNFTKLKNFTGLFEFYKLLCVRGIITSKTKSLDKGYNKALNDLCIKVNNWDLFFSPSEDNFTNDLNKGEEITSDTNIEAAEENISLDLIQQYYLTFNFDNEPENISIENLSSDIIGQLELMPNIERFPNGKKYELDKYTMFHYLRAQEFEHGKSRIALTNSVNEALLNPSRVYTFFSSDYVKKVNKATEAAMFLGWVEQLVYDFTDETSEVSTTDKIADITIIIPYIGPALNIGNMLYKDDFVGALIFSGAVILLEFIPEIAIPVLGTFALVSYIANKVLTVQTIDNALSKRNEKWDEVYKYIVTNWLAKVNTQIDLIRKKMKEALENQAEATKAIINYQYNQYTEEEKNNINFNIDDLSSKLNESINKAMININKFLNQCSVSYLMNSMIPYGVKRLEDFDASLKDALLKYIYDNRGTLIGQVDRLKDKVNNTLSTDIPFQLSKYVDNQRLLSTFTEYIKNIINTSILNLRYESNHLIDLSRYASKINIGSKVNFDPIDKNQIQLFNLESSKIEVILKNAIVYNSMYENFSTSFWIRIPKYFNSISLNNEYTIINCMENNSGWKVSLNYGEIIWTLQDTQEIKQRVVFKYSQMINISDYINRWIFVTITNNRLNKSKIYINGRLIDQKPISNLGNIHASNNIMFKLDGCRDTHRYIWIKYFNLFDKELNEKEIKDLYDNQSNSGILKDFWGDYLQYDKPYYMLNLYDPNKYVDVNNVGIRGYMYLKGPRGSVMTTNIYLNSSLYRGTKFIIKKYASGNKDNIVRNNDRVYINVVVKNKEYRLATNASQAGVEKILSALEIPDVGNLSQVVVMKSKNDQGITNKCKMNLQDNNGNDIGFIGFHQFNNIAKLVASNWYNRQIERSSRTLGCSWEFIPVDDGWGERPL

SEQ ID NO: 13 - protein, 1296 aa, Artificial Sequence
  Synthetic
MPFVNKQFNYKDPVNGVDIAYIKIPNAGQMQPVKAFKIHNKIWVIPERDTFTNPEEGDLNPPPEAKQVPVSYYDSTYLSTDNEKDNYLKGVTKLFERIYSTDLGRMLLTSIVRGIPFWGGSTIDTELKVIDTNCINVIQPDGSYRSEELNLVIIGPSADIIQFECKSFGHEVLNLTRNGYGSTQYIRFSPDFTFGFEESLEVDTNPLLGAGKFATDPAVTLAHELIHAGHRLYGIAINPNRVFKVNTNAYYEMSGLEVSFEELRTFGGHDAKFIDSLQENEFRLYYYNKFKDIASTLNKAKSIVGTTASLQYMKNVFKEKYLLSEDTSGKFSVDKLKFDKLYKMLTEIYTEDNFVKFFKVLNRKTYLNFDKAVFKINIVPKVNYTIYDGFNLRNTNLAANFNGQNTEINNMNFTKLKNFTGLFEFYKLLCVRGIITSKTKSLDKGYNKALNDLCIKVNNWDLFFSPSEDNFTNDLNKGEEITSDTNIEAAEENISLDLIQQYYLTFNFDNEPENISIENLSSDIIGQLELMPNIERFPNGKKYELDKYTMFHYLRAQEFEHGKSRIALTNSVNEALLNPSRVYTFFSSDYVKKVNKATEAAMFLGWVEQLVYDFTDETSEVSTTDKIADITIIIPYIGPALNIGNMLYKDDFVGALIFSGAVILLEFIPEIAIPVLGTFALVSYIANKVLTVQTIDNALSKRNEKWDEVYKYIVTNWLAKVNTQIDLIRKKMKEALENQAEATKAIINYQYNQYTEEEKNNINFNIDDLSSKLNESINKAMININKFLNQCSVSYLMNSMIPYGVKRLEDFDASLKDALLKYIYDNRGTLIGQVDRLKDKVNNTLSTDIPFQLSKYVDNQRLLSTFTEYIKNIINTSILNLRYESNHLIDLSRYASKINIGSKVNFDPIDKNQIQLFNLESSKIEVILKNAIVYNSMYENFSTSFWIRIPKYFNSISLNNEYTIINCMENNSGWKVSLNYGEIIWTLQDTQEIKQRVVFKYSQMINISDYINRWIFVTITNNRLNNSKIYINGRLIDQKPISNLGNIHASNKIMFKLDGCRDTHRYIWIKYFNLFDKELNEKEIKDLYDNQSNSGILKDFWGDYLQYDKPYYMLNLYDPNKYVDVNNVGIRGYMYLKGPRGSVMTTNIYLNSSLYRGTKFIIKKYASGNKDNIVRNNDRVYINVVVKNKEYRLATNASQAGVEKILSALEIPDVGNLSQVVVMKSKNDQGITNKCKMNLQDNNGNDIGFIGFHQFNNIAKLVASNWYNRQIERSSRTLGCSWEFIPVDDGWGERPL

SEQ ID NO: 14 - protein, 1296 aa, Artificial Sequence
  Synthetic
MPFVNKQFNYKDPVNGVDIAYIKIPNAGQMQPVKAFKIHNKIWVIPERDTFTNPEEGDLNPPPEAKQVPVSYYDSTYLSTDNEKDNYLKGVTKLFERIYSTDLGRMLLTSIVRGIPFWGGSTIDTELKVIDTNCINVIQPDGSYRSEELNLVIIGPSADIIQFECKSFGHEVLNLTRNGYGSTQYIRFSPDFTFGFEESLEVDTNPLLGAGKFATDPAVTLAHELIHAGHRLYGIAINPNRVFKVNTNAYYEMSGLEVSFEELRTFGGHDAKFIDSLQENEFRLYYYNKFKDIASTLNKAKSIVGTTASLQYMKNVFKEKYLLSEDTSGKFSVDKLKFDKLYKMLTEIYTEDNFVKFFKVLNRKTYLNFDKAVFKINIVPKVNYTIYDGFNLRNTNLAANFNGQNTEINNMNFTKLKNFTGLFEFYKLLCVRGIITSKTKSLDKGYNKALNDLCIKVNNWDLFFSPSEDNFTNDLNKGEEITSDTNIEAAEENISLDLIQQYYLTFNFDNEPENISIENLSSDIIGQLELMPNIERFPNGKKYELDKYTMFHYLRAQEFEHGKSRIALTNSVNEALLNPSRVYTFFSSDYVKKVNKATEAAMFLGWVEQLVYDFTDETSEVSTTDKIADITIIIPYIGPALNIGNMLYKDDFVGALIFSGAVILLEFIPEIAIPVLGTFALVSYIANKVLTVQTIDNALSKRNEKWDEVYKYIVTNWLAKVNTQIDLIRKKMKEALENQAEATKAIINYQYNQYTEEEKNNINFNIDDLSSKLNESINKAMININKFLNQCSVSYLMNSMIPYGVKRLEDFDASLKDALLKYIYDNRGTLIGQVDRLKDKVNNTLSTDIPFQLSKYVDNQRLLSTFTEYIKNIINTSILNLRYESNHLIDLSRYASKINIGSKVNFDPIDKNQIQLFNLESSKIEVILKNAIVYNSMYENFSTSFWIRIPKYFNSISLNNEYTIINCMENNSGWKVSLNYGEIIWTLQDTQEIKQRVVFKYSQMINISDYINRWIFVTITNNRLNNSKIYINGRLIDQKPISNLGNIHASNNIMFKLDGCRETHRYIWIKYFNLFDKELNEKEIKDLYDNQSNSGILKDFWGDYLQYDKPYYMLNLYDPNKYVDVNNVGIRGYMYLKGPRGSVMTTNIYLNSSLYRGTKFIIKKYASGNKDNIVRNNDRVYINVVVKNKEYRLATNASQAGVEKILSALEIPDVGNLSQVVVMKSKNDQGITNKCKMNLQDNNGNDIGFIGFHQFNNIAKLVASNWYNRQIERSSRTLGCSWEFIPVDDGWGERPL

SEQ ID NO: 15 - protein, 1296 aa, Artificial Sequence
  Synthetic
MPFVNKQFNYKDPVNGVDIAYIKIPNAGQMQPVKAFKIHNKIWVIPERDTFTNPEEGDLNPPPEAKQVPVSYYDSTYLSTDNEKDNYLKGVTKLFERIYSTDLGRMLLTSIVRGIPFWGGSTIDTELKVIDTNCINVIQPDGSYRSEELNLVIIGPSADIIQFECKSFGHEVLNLTRNGYGSTQYIRFSPDFTFGFEESLEVDTNPLLGAGKFATDPAVTLAHELIHAGHRLYGIAINPNRVFKVNTNAYYEMSGLEVSFEELRTFGGHDAKFIDSLQENEFRLYYYNKFKDIASTLNKAKSIVGTTASLQYMKNVFKEKYLLSEDTSGKFSVDKLKFDKLYKMLTEIYTEDNFVKFFKVLNRKTYLNFDKAVFKINIVPKVNYTIYDGFNLRNTNLAANFNGQNTEINNMNFTKLKNFTGLFEFYKLLCVRGIITSKTKSLDKGYNKALNDLCIKVNNWDLFFSPSEDNFTNDLNKGEEITSDTNIEAAEENISLDLIQQYYLTFNFDNEPENISIENLSSDIIGQLELMPNIERFPNGKKYELDKYTMFHYLRAQEFEHGKSRIALTNSVNEALLNPSRVYTFFSSDYVKKVNKATEAAMFLGWVEQLVYDFTDETSEVSTTDKIADITIIIPYIGPALNIGNMLYKDDFVGALIFSGAVILLEFIPEIAIPVLGTFALVSYIANKVLTVQTIDNALSKRNEKWDEVYKYIVTNWLAKVNTQIDLIRKKMKEALENQAEATKAIINYQYNQYTEEEKNNINFNIDDLSSKLNESINKAMININKFLNQCSVSYLMNSMIPYGVKRLEDFDASLKDALLKYIYDNRGTLIGQVDRLKDKVNNTLSTDIPFQLSKYVDNQRLLSTFTEYIKNIINTSILNLRYESNHLIDLSRYASKINIGSKVNFDPIDKNQIQLFNLESSKIEVILKNAIVYNSMYENFSTSFWIRIPKYFNSISLNNEYTIINCMENNSGWKVSLNYGEIIWTLQDTQEIKQRVVFKYSQMINISDYINRWIFVTITNNRLNNSKIYINGRLIDQKPISNLGNIHASNNIMFKLDGCRDPHRYIWIKYFNLFDKELNEKEIKDLYDNQSNSGILKDFWGDYLQYDKPYYMLNLYDPNKYVDVNNVGIRGYMYLKGPRGSVMTTNIYLNSSLYRGTKFIIKKYASGNKDNIVRNNDRVYINVVVKNKEYRLATNASQAGVEKILSALEIPDVGNLSQVVVMKSKNDQGITNKCKMNLQDNNGNDIGFIGFHQFNNIAKLVASNWYNRQIERSSRTLGCSWEFIPVDDGWGERPL

SEQ ID NO: 16 - protein, 1296 aa, Artificial Sequence
  Synthetic
MPFVNKQFNYKDPVNGVDIAYIKIPNAGQMQPVKAFKIHNKIWVIPERDTFTNPEEGDLNPPPEAKQVPVSYYDSTYLSTDNEKDNYLKGVTKLFERIYSTDLGRMLLTSIVRGIPFWGGSTIDTELKVIDTNCINVIQPDGSYRSEELNLVIIGPSADIIQFECKSFGHEVLNLTRNGYGSTQYIRFSPDFTFGFEESLEVDTNPLLGAGKFATDPAVTLAHELIHAGHRLYGIAINPNRVFKVNTNAYYEMSGLEVSFEELRTFGGHDAKFIDSLQENEFRLYYYNKFKDIASTLNKAKSIVGTTASLQYMKNVFKEKYLLSEDTSGKFSVDKLKFDKLYKMLTEIYTEDNFVKFFKVLNRKTYLNFDKAVFKINIVPKVNYTIYDGFNLRNTNLAANFNGQNTEINNMNFTKLKNFTGLFEFYKLLCVRGIITSKTKSLDKGYNKALNDLCIKVNNWDLFFSPSEDNFTNDLNKGEEITSDTNIEAAEENISLDLIQQYYLTFNFDNEPENISIENLSSDIIGQLELMPNIERFPNGKKYELDKYTMFHYLRAQEFEHGKSRIALTNSVNEALLNPSRVYTFFSSDYVKKVNKATEAAMFLGWVEQLVYDFTDETSEVSTTDKIADITIIIPYIGPALNIGNMLYKDDFVGALIFSGAVILLEFIPEIAIPVLGTFALVSYIANKVLTVQTIDNALSKRNEKWDEVYKYIVTNWLAKVNTQIDLIRKKMKEALENQAEATKAIINYQYNQYTEEEKNNINFNIDDLSSKLNESINKAMININKFLNQCSVSYLMNSMIPYGVKRLEDFDASLKDALLKYIYDNRGTLIGQVDRLKDKVNNTLSTDIPFQLSKYVDNQRLLSTFTEYIKNIINTSILNLRYESNHLIDLSRYASKINIGSKVNFDPIDKNQIQLFNLESSKIEVILKNAIVYNSMYENFSTSFWIRIPKYFNSISLNNEYTIINCMENNSGWKVSLNYGEIIWTLQDTQEIKQRVVFKYSQMINISDYINRWIFVTITNNRLNNSKIYINGRLIDQKPISNLGNIHASNNIMFKLDGCRDTRRYIWIKYFNLFDKELNEKEIKDLYDNQSNSGILKDFWGDYLQYDKPYYMLNLYDPNKYVDVNNVGIRGYMYLKGPRGSVMTTNIYLNSSLYRGTKFIIKKYASGNKDNIVRNNDRVYINVVVKNKEYRLATNASQAGVEKILSALEIPDVGNLSQVVVMKSKNDQGITNKCKMNLQDNNGNDIGFIGFHQFNNIAKLVASNWYNRQIERSSRTLGCSWEFIPVDDGWGERPL

SEQ ID NO: 17 - protein, 1296 aa, Artificial Sequence
  Synthetic
MPFVNKQFNYKDPVNGVDIAYIKIPNAGQMQPVKAFKIHNKIWVIPERDTFTNPEEGDLNPPPEAKQVPVSYYDSTYLSTDNEKDNYLKGVTKLFERIYSTDLGRMLLTSIVRGIPFWGGSTIDTELKVIDTNCINVIQPDGSYRSEELNLVIIGPSADIIQFECKSFGHEVLNLTRNGYGSTQYIRFSPDFTFGFEESLEVDTNPLLGAGKFATDPAVTLAHELIHAGHRLYGIAINPNRVFKVNTNAYYEMSGLEVSFEELRTFGGHDAKFIDSLQENEFRLYYYNKFKDIASTLNKAKSIVGTTASLQYMKNVFKEKYLLSEDTSGKFSVDKLKFDKLYKMLTEIYTEDNFVKFFKVLNRKTYLNFDKAVFKINIVPKVNYTIYDGFNLRNTNLAANFNGQNTEINNMNFTKLKNFTGLFEFYKLLCVRGIITSKTKSLDKGYNKALNDLCIKVNNWDLFFSPSEDNFTNDLNKGEEITSDTNIEAAEENISLDLIQQYYLTFNFDNEPENISIENLSSDIIGQLELMPNIERFPNGKKYELDKYTMFHYLRAQEFEHGKSRIALTNSVNEALLNPSRVYTFFSSDYVKKVNKATEAAMFLGWVEQLVYDFTDETSEVSTTDKIADITIIIPYIGPALNIGNMLYKDDFVGALIFSGAVILLEFIPEIAIPVLGTFALVSYIANKVLTVQTIDNALSKRNEKWDEVYKYIVTNWLAKVNTQIDLIRKKMKEALENQAEATKAIINYQYNQYTEEEKNNINFNIDDLSSKLNESINKAMININKFLNQCSVSYLMNSMIPYGVKRLEDFDASLKDALLKYIYDNRGTLIGQVDRLKDKVNNTLSTDIPFQLSKYVDNQRLLSTFTEYIKNIINTSILNLRYESNHLIDLSRYASKINIGSKVNFDPIDKNQIQLFNLESSKIEVILKNAIVYNSMYENFSTSFWIRIPKYFNSISLNNEYTIINCMENNSGWKVSLNYGEIIWTLQDTQEIKQRVVFKYSQMINISDYINRWIFVTITNNRLNNSKIYINGRLIDQKPISNLGNIHASNNIMFKLDGCRDTQRYIWIKYFNLFDKELNEKEIKDLYDNQSNSGILKDFWGDYLQYDKPYYMLNLYDPNKYVDVNNVGIRGYMYLKGPRGSVMTTNIYLNSSLYRGTKFIIKKYASGNKDNIVRNNDRVYINVVVKNKEYRLATNASQAGVEKILSALEIPDVGNLSQVVVMKSKNDQGITNKCKMNLQDNNGNDIGFIGFHQFNNIAKLVASNWYNRQIERSSRTLGCSWEFIPVDDGWGERPL

SEQ ID NO: 18 - protein, 1296 aa, Artificial Sequence
  Synthetic
MPFVNKQFNYKDPVNGVDIAYIKIPNAGQMQPVKAFKIHNKIWVIPERDTFTNPEEGDLNPPPEAKQVPVSYYDSTYLSTDNEKDNYLKGVTKLFERIYSTDLGRMLLTSIVRGIPFWGGSTIDTELKVIDTNCINVIQPDGSYRSEELNLVIIGPSADIIQFECKSFGHEVLNLTRNGYGSTQYIRFSPDFTFGFEESLEVDTNPLLGAGKFATDPAVTLAHELIHAGHRLYGIAINPNRVFKVNTNAYYEMSGLEVSFEELRTFGGHDAKFIDSLQENEFRLYYYNKFKDIASTLNKAKSIVGTTASLQYMKNVFKEKYLLSEDTSGKFSVDKLKFDKLYKMLTEIYTEDNFVKFFKVLNRKTYLNFDKAVFKINIVPKVNYTIYDGFNLRNTNLAANFNGQNTEINNMNFTKLKNFTGLFEFYKLLCVRGIITSKTKSLDKGYNKALNDLCIKVNNWDLFFSPSEDNFTNDLNKGEEITSDTNIEAAEENISLDLIQQYYLTFNFDNEPENISIENLSSDIIGQLELMPNIERFPNGKKYELDKYTMFHYLRAQEFEHGKSRIALTNSVNEALLNPSRVYTFFSSDYVKKVNKATEAAMFLGWVEQLVYDFTDETSEVSTTDKIADITIIIPYIGPALNIGNMLYKDDFVGALIFSGAVILLEFIPEIAIPVLGTFALVSYIANKVLTVQTIDNALSKRNEKWDEVYKYIVTNWLAKVNTQIDLIRKKMKEALENQAEATKAIINYQYNQYTEEEKNNINFNIDDLSSKLNESINKAMININKFLNQCSVSYLMNSMIPYGVKRLEDFDASLKDALLKYIYDNRGTLIGQVDRLKDKVNNTLSTDIPFQLSKYVDNQRLLSTFTEYIKNIINTSILNLRYESNHLIDLSRYASKINIGSKVNFDPIDKNQIQLFNLESSKIEVILKNAIVYNSMYENFSTSFWIRIPKYFNSISLNNEYTIINCMENNSGWKVSLNYGEIIWTLQDTQEIKQRVVFKYSQMINISDYINRWIFVTITNNRLNNSKIYINGRLIDQKPISNLGNIHASNNIMFKLDGCRDTHNYIWIKYFNLFDKELNEKEIKDLYDNQSNSGILKDFWGDYLQYDKPYYMLNLYDPNKYVDVNNVGIRGYMYLKGPRGSVMTTNIYLNSSLYRGTKFIIKKYASGNKDNIVRNNDRVYINVVVKNKEYRLATNASQAGVEKILSALEIPDVGNLSQVVVMKSKNDQGITNKCKMNLQDNNGNDIGFIGFHQFNNIAKLVASNWYNRQIERSSRTLGCSWEFIPVDDGWGERPL

SEQ ID NO: 19 - protein, 1296 aa, Artificial Sequence
  Synthetic
MPFVNKQFNYKDPVNGVDIAYIKIPNAGQMQPVKAFKIHNKIWVIPERDTFTNPEEGDLNPPPEAKQVPVSYYDSTYLSTDNEKDNYLKGVTKLFERIYSTDLGRMLLTSIVRGIPFWGGSTIDTELKVIDTNCINVIQPDGSYRSEELNLVIIGPSADIIQFECKSFGHEVLNLTRNGYGSTQYIRFSPDFTFGFEESLEVDTNPLLGAGKFATDPAVTLAHELIHAGHRLYGIAINPNRVFKVNTNAYYEMSGLEVSFEELRTFGGHDAKFIDSLQENEFRLYYYNKFKDIASTLNKAKSIVGTTASLQYMKNVFKEKYLLSEDTSGKFSVDKLKFDKLYKMLTEIYTEDNFVKFFKVLNRKTYLNFDKAVFKINIVPKVNYTIYDGFNLRNTNLAANFNGQNTEINNMNFTKLKNFTGLFEFYKLLCVRGIITSKTKSLDKGYNKALNDLCIKVNNWDLFFSPSEDNFTNDLNKGEEITSDTNIEAAEENISLDLIQQYYLTFNFDNEPENISIENLSSDIIGQLELMPNIERFPNGKKYELDKYTMFHYLRAQEFEHGKSRIALTNSVNEALLNPSRVYTFFSSDYVKKVNKATEAAMFLGWVEQLVYDFTDETSEVSTTDKIADITIIIPYIGPALNIGNMLYKDDFVGALIFSGAVILLEFIPEIAIPVLGTFALVSYIANKVLTVQTIDNALSKRNEKWDEVYKYIVTNWLAKVNTQIDLIRKKMKEALENQAEATKAIINYQYNQYTEEEKNNINFNIDDLSSKLNESINKAMININKFLNQCSVSYLMNSMIPYGVKRLEDFDASLKDALLKYIYDNRGTLIGQVDRLKDKVNNTLSTDIPFQLSKYVDNQRLLSTFTEYIKNIINTSILNLRYESNHLIDLSRYASKINIGSKVNFDPIDKNQIQLFNLESSKIEVILKNAIVYNSMYENFSTSFWIRIPKYFNSISLNNEYTIINCMENNSGWKVSLNYGEIIWTLQDTQEIKQRVVFKYSQMINISDYINRWIFVTITNNRLNNSKIYINGRLIDQKPISNLGNIHASNNIMFKLDGCRDTHRRIWIKYFNLFDKELNEKEIKDLYDNQSNSGILKDFWGDYLQYDKPYYMLNLYDPNKYVDVNNVGIRGYMYLKGPRGSVMTTNIYLNSSLYRGTKFIIKKYASGNKDNIVRNNDRVYINVVVKNKEYRLATNASQAGVEKILSALEIPDVGNLSQVVVMKSKNDQGITNKCKMNLQDNNGNDIGFIGFHQFNNIAKLVASNWYNRQIERSSRTLGCSWEFIPVDDGWGERPL

SEQ ID NO: 20 - protein, 1296 aa, Artificial Sequence
  Synthetic
MPFVNKQFNYKDPVNGVDIAYIKIPNAGQMQPVKAFKIHNKIWVIPERDTFTNPEEGDLNPPPEAKQVPVSYYDSTYLSTDNEKDNYLKGVTKLFERIYSTDLGRMLLTSIVRGIPFWGGSTIDTELKVIDTNCINVIQPDGSYRSEELNLVIIGPSADIIQFECKSFGHEVLNLTRNGYGSTQYIRFSPDFTFGFEESLEVDTNPLLGAGKFATDPAVTLAHELIHAGHRLYGIAINPNRVFKVNTNAYYEMSGLEVSFEELRTFGGHDAKFIDSLQENEFRLYYYNKFKDIASTLNKAKSIVGTTASLQYMKNVFKEKYLLSEDTSGKFSVDKLKFDKLYKMLTEIYTEDNFVKFFKVLNRKTYLNFDKAVFKINIVPKVNYTIYDGFNLRNTNLAANFNGQNTEINNMNFTKLKNFTGLFEFYKLLCVRGIITSKTKSLDKGYNKALNDLCIKVNNWDLFFSPSEDNFTNDLNKGEEITSDTNIEAAEENISLDLIQQYYLTFNFDNEPENISIENLSSDIIGQLELMPNIERFPNGKKYELDKYTMFHYLRAQEFEHGKSRIALTNSVNEALLNPSRVYTFFSSDYVKKVNKATEAAMFLGWVEQLVYDFTDETSEVSTTDKIADITIIIPYIGPALNIGNMLYKDDFVGALIFSGAVILLEFIPEIAIPVLGTFALVSYIANKVLTVQTIDNALSKRNEKWDEVYKYIVTNWLAKVNTQIDLIRKKMKEALENQAEATKAIINYQYNQYTEEEKNNINFNIDDLSSKLNESINKAMININKFLNQCSVSYLMNSMIPYGVKRLEDFDASLKDALLKYIYDNRGTLIGQVDRLKDKVNNTLSTDIPFQLSKYVDNQRLLSTFTEYIKNIINTSILNLRYESNHLIDLSRYASKINIGSKVNFDPIDKNQIQLFNLESSKIEVILKNAIVYNSMYENFSTSFWIRIPKYFNSISLNNEYTIINCMENNSGWKVSLNYGEIIWTLQDTQEIKQRVVFKYSQMINISDYINRWIFVTITNNRLNNSKIYINGRLIDQKPISNLGNIHASNNIMFKLDGCRDTHRKIWIKYFNLFDKELNEKEIKDLYDNQSNSGILKDFWGDYLQYDKPYYMLNLYDPNKYVDVNNVGIRGYMYLKGPRGSVMTTNIYLNSSLYRGTKFIIKKYASGNKDNIVRNNDRVYINVVVKNKEYRLATNASQAGVEKILSALEIPDVGNLSQVVVMKSKNDQGITNKCKMNLQDNNGNDIGFIGFHQFNNIAKLVASNWYNRQIERSSRTLGCSWEFIPVDDGWGERPL

SEQ ID NO: 21 - protein, 1296 aa, Artificial Sequence
  Synthetic
MPFVNKQFNYKDPVNGVDIAYIKIPNAGQMQPVKAFKIHNKIWVIPERDTFTNPEEGDLNPPPEAKQVPVSYYDSTYLSTDNEKDNYLKGVTKLFERIYSTDLGRMLLTSIVRGIPFWGGSTIDTELKVIDTNCINVIQPDGSYRSEELNLVIIGPSADIIQFECKSFGHEVLNLTRNGYGSTQYIRFSPDFTFGFEESLEVDTNPLLGAGKFATDPAVTLAHELIHAGHRLYGIAINPNRVFKVNTNAYYEMSGLEVSFEELRTFGGHDAKFIDSLQENEFRLYYYNKFKDIASTLNKAKSIVGTTASLQYMKNVFKEKYLLSEDTSGKFSVDKLKFDKLYKMLTEIYTEDNFVKFFKVLNRKTYLNFDKAVFKINIVPKVNYTIYDGFNLRNTNLAANFNGQNTEINNMNFTKLKNFTGLFEFYKLLCVRGIITSKTKSLDKGYNKALNDLCIKVNNWDLFFSPSEDNFTNDLNKGEEITSDTNIEAAEENISLDLIQQYYLTFNFDNEPENISIENLSSDIIGQLELMPNIERFPNGKKYELDKYTMFHYLRAQEFEHGKSRIALTNSVNEALLNPSRVYTFFSSDYVKKVNKATEAAMFLGWVEQLVYDFTDETSEVSTTDKIADITIIIPYIGPALNIGNMLYKDDFVGALIFSGAVILLEFIPEIAIPVLGTFALVSYIANKVLTVQTIDNALSKRNEKWDEVYKYIVTNWLAKVNTQIDLIRKKMKEALENQAEATKAIINYQYNQYTEEEKNNINFNIDDLSSKLNESINKAMININKFLNQCSVSYLMNSMIPYGVKRLEDFDASLKDALLKYIYDNRGTLIGQVDRLKDKVNNTLSTDIPFQLSKYVDNQRLLSTFTEYIKNIINTSILNLRYESNHLIDLSRYASKINIGSKVNFDPIDKNQIQLFNLESSKIEVILKNAIVYNSMYENFSTSFWIRIPKYFNSISLNNEYTIINCMENNSGWKVSLNYGEIIWTLQDTQEIKQRVVFKYSQMINISDYINRWIFVTITNNRLNNSKIYINGRLIDQKPISNLGNIHASNNIMFKLDGCRDTHRYIWIKYFNLFDKELNEKEIKDLYDNQSNSGILKDFWGDYLQYDKPYYMLNLYDPNKYVDVNNVGIRGYMYLKGPRGSVMYTNIYLNSSLYRGTKFIIKKYASGNKDNIVRNNDRVYINVVVKNKEYRLATNASQAGVEKILSALEIPDVGNLSQVVVMKSKNDQGITNKCKMNLQDNNGNDIGFIGFHQFNNIAKLVASNWYNRQIERSSRTLGCSWEFIPVDDGWGERPL

SEQ ID NO: 22 - protein, 1296 aa, Artificial Sequence
  Synthetic
MPFVNKQFNYKDPVNGVDIAYIKIPNAGQMQPVKAFKIHNKIWVIPERDTFTNPEEGDLNPPPEAKQVPVSYYDSTYLSTDNEKDNYLKGVTKLFERIYSTDLGRMLLTSIVRGIPFWGGSTIDTELKVIDTNCINVIQPDGSYRSEELNLVIIGPSADIIQFECKSFGHEVLNLTRNGYGSTQYIRFSPDFTFGFEESLEVDTNPLLGAGKFATDPAVTLAHELIHAGHRLYGIAINPNRVFKVNTNAYYEMSGLEVSFEELRTFGGHDAKFIDSLQENEFRLYYYNKFKDIASTLNKAKSIVGTTASLQYMKNVFKEKYLLSEDTSGKFSVDKLKFDKLYKMLTEIYTEDNFVKFFKVLNRKTYLNFDKAVFKINIVPKVNYTIYDGFNLRNTNLAANFNGQNTEINNMNFTKLKNFTGLFEFYKLLCVRGIITSKTKSLDKGYNKALNDLCIKVNNWDLFFSPSEDNFTNDLNKGEEITSDTNIEAAEENISLDLIQQYYLTFNFDNEPENISIENLSSDIIGQLELMPNIERFPNGKKYELDKYTMFHYLRAQEFEHGKSRIALTNSVNEALLNPSRVYTFFSSDYVKKVNKATEAAMFLGWVEQLVYDFTDETSEVSTTDKIADITIIIPYIGPALNIGNMLYKDDFVGALIFSGAVILLEFIPEIAIPVLGTFALVSYIANKVLTVQTIDNALSKRNEKWDEVYKYIVTNWLAKVNTQIDLIRKKMKEALENQAEATKAIINYQYNQYTEEEKNNINFNIDDLSSKLNESINKAMININKFLNQCSVSYLMNSMIPYGVKRLEDFDASLKDALLKYIYDNRGTLIGQVDRLKDKVNNTLSTDIPFQLSKYVDNQRLLSTFTEYIKNIINTSILNLRYESNHLIDLSRYASKINIGSKVNFDPIDKNQIQLFNLESSKIEVILKNAIVYNSMYENFSTSFWIRIPKYFNSISLNNEYTIINCMENNSGWKVSLNYGEIIWTLQDTQEIKQRVVFKYSQMINISDYINRWIFVTITNNRLNNSKIYINGRLIDQKPISNLGNIHASNNIMFKLDGCRDTHRYIWIKYFNLFDKELNEKEIKDLYDNQSNSGILKDFWGDYLQYDKPYYMLNLYDPNKYVDVNNVGIRGYMYLKGPRGSVMTTNIYLNSSLYMGTKFIIKKYASGNKDNIVRNNDRVYINVVVKNKEYRLATNASQAGVEKILSALEIPDVGNLSQVVVMKSKNDQGITNKCKMNLQDNNGNDIGFIGFHQFNNIAKLVASNWYNRQIERSSRTLGCSWEFIPVDDGWGERPL

SEQ ID NO: 23 - protein, 1296 aa, Artificial Sequence
  Synthetic
MPFVNKQFNYKDPVNGVDIAYIKIPNAGQMQPVKAFKIHNKIWVIPERDTFTNPEEGDLNPPPEAKQVPVSYYDSTYLSTDNEKDNYLKGVTKLFERIYSTDLGRMLLTSIVRGIPFWGGSTIDTELKVIDTNCINVIQPDGSYRSEELNLVIIGPSADIIQFECKSFGHEVLNLTRNGYGSTQYIRFSPDFTFGFEESLEVDTNPLLGAGKFATDPAVTLAHELIHAGHRLYGIAINPNRVFKVNTNAYYEMSGLEVSFEELRTFGGHDAKFIDSLQENEFRLYYYNKFKDIASTLNKAKSIVGTTASLQYMKNVFKEKYLLSEDTSGKFSVDKLKFDKLYKMLTEIYTEDNFVKFFKVLNRKTYLNFDKAVFKINIVPKVNYTIYDGFNLRNTNLAANFNGQNTEINNMNFTKLKNFTGLFEFYKLLCVRGIITSKTKSLDKGYNKALNDLCIKVNNWDLFFSPSEDNFTNDLNKGEEITSDTNIEAAEENISLDLIQQYYLTFNFDNEPENISIENLSSDIIGQLELMPNIERFPNGKKYELDKYTMFHYLRAQEFEHGKSRIALTNSVNEALLNPSRVYTFFSSDYVKKVNKATEAAMFLGWVEQLVYDFTDETSEVSTTDKIADITIIIPYIGPALNIGNMLYKDDFVGALIFSGAVILLEFIPEIAIPVLGTFALVSYIANKVLTVQTIDNALSKRNEKWDEVYKYIVTNWLAKVNTQIDLIRKKMKEALENQAEATKAIINYQYNQYTEEEKNNINFNIDDLSSKLNESINKAMININKFLNQCSVSYLMNSMIPYGVKRLEDFDASLKDALLKYIYDNRGTLIGQVDRLKDKVNNTLSTDIPFQLSKYVDNQRLLSTFTEYIKNIINTSILNLRYESNHLIDLSRYASKINIGSKVNFDPIDKNQIQLFNLESSKIEVILKNAIVYNSMYENFSTSFWIRIPKYFNSISLNNEYTIINCMENNSGWKVSLNYGEIIWTLQDTQEIKQRVVFKYSQMINISDYINRWIFVTITNNRLNNSKIYINGRLIDQKPISNLGNIHASNNIMFKLDGCRDTHRYIWIKYFNLFDKELNEKEIKDLYDNQSNSGILKDFWGDYLQYDKPYYMLNLYDPNKYVDVNNVGIRGYMYLKGPRGSVMTTNIYLNSSLYIGTKFIIKKYASGNKDNIVRNNDRVYINVVVKNKEYRLATNASQAGVEKILSALEIPDVGNLSQVVVMKSKNDQGITNKCKMNLQDNNGNDIGFIGFHQFNNIAKLVASNWYNRQIERSSRTLGCSWEFIPVDDGWGERPL

SEQ ID NO: 24 - protein, 1296 aa, Artificial Sequence
  Synthetic
MPFVNKQFNYKDPVNGVDIAYIKIPNAGQMQPVKAFKIHNKIWVIPERDTFTNPEEGDLNPPPEAKQVPVSYYDSTYLSTDNEKDNYLKGVTKLFERIYSTDLGRMLLTSIVRGIPFWGGSTIDTELKVIDTNCINVIQPDGSYRSEELNLVIIGPSADIIQFECKSFGHEVLNLTRNGYGSTQYIRFSPDFTFGFEESLEVDTNPLLGAGKFATDPAVTLAHELIHAGHRLYGIAINPNRVFKVNTNAYYEMSGLEVSFEELRTFGGHDAKFIDSLQENEFRLYYYNKFKDIASTLNKAKSIVGTTASLQYMKNVFKEKYLLSEDTSGKFSVDKLKFDKLYKMLTEIYTEDNFVKFFKVLNRKTYLNFDKAVFKINIVPKVNYTIYDGFNLRNTNLAANFNGQNTEINNMNFTKLKNFTGLFEFYKLLCVRGIITSKTKSLDKGYNKALNDLCIKVNNWDLFFSPSEDNFTNDLNKGEEITSDTNIEAAEENISLDLIQQYYLTFNFDNEPENISIENLSSDIIGQLELMPNIERFPNGKKYELDKYTMFHYLRAQEFEHGKSRIALTNSVNEALLNPSRVYTFFSSDYVKKVNKATEAAMFLGWVEQLVYDFTDETSEVSTTDKIADITIIIPYIGPALNIGNMLYKDDFVGALIFSGAVILLEFIPEIAIPVLGTFALVSYIANKVLTVQTIDNALSKRNEKWDEVYKYIVTNWLAKVNTQIDLIRKKMKEALENQAEATKAIINYQYNQYTEEEKNNINFNIDDLSSKLNESINKAMININKFLNQCSVSYLMNSMIPYGVKRLEDFDASLKDALLKYIYDNRGTLIGQVDRLKDKVNNTLSTDIPFQLSKYVDNQRLLSTFTEYIKNIINTSILNLRYESNHLIDLSRYASKINIGSKVNFDPIDKNQIQLFNLESSKIEVILKNAIVYNSMYENFSTSFWIRIPKYFNSISLNNEYTIINCMENNSGWKVSLNYGEIIWTLQDTQEIKQRVVFKYSQMINISDYINRWIFVTITNNRLNNSKIYINGRLIDQKPISNLGNIHASNNIMFKLDGCRDTHRYIWIKYFNLFDKELNEKEIKDLYDNQSNSGILKDFWGDYLQYDKPYYMLNLYDPNKYVDVNNVGIRGYMYLKGPRGSVMTTNIYLNSSLYRGTKFIIKKYASGNKDNIVRNNDRVYINVVVKNKEYRLATNASQAGVEKILSALEIPDVGNLSQVVVMKSKNDQGIRNKCKMNLQDNNGNDIGFIGFHQFNNIAKLVASNWYNRQIERSSRTLGCSWEFIPVDDGWGERPL

SEQ ID NO: 25 - protein, 1296 aa, Artificial Sequence
  Synthetic
MPFVNKQFNYKDPVNGVDIAYIKIPNAGQMQPVKAFKIHNKIWVIPERDTFTNPEEGDLNPPPEAKQVPVSYYDSTYLSTDNEKDNYLKGVTKLFERIYSTDLGRMLLTSIVRGIPFWGGSTIDTELKVIDTNCINVIQPDGSYRSEELNLVIIGPSADIIQFECKSFGHEVLNLTRNGYGSTQYIRFSPDFTFGFEESLEVDTNPLLGAGKFATDPAVTLAHELIHAGHRLYGIAINPNRVFKVNTNAYYEMSGLEVSFEELRTFGGHDAKFIDSLQENEFRLYYYNKFKDIASTLNKAKSIVGTTASLQYMKNVFKEKYLLSEDTSGKFSVDKLKFDKLYKMLTEIYTEDNFVKFFKVLNRKTYLNFDKAVFKINIVPKVNYTIYDGFNLRNTNLAANFNGQNTEINNMNFTKLKNFTGLFEFYKLLCVRGIITSKTKSLDKGYNKALNDLCIKVNNWDLFFSPSEDNFTNDLNKGEEITSDTNIEAAEENISLDLIQQYYLTFNFDNEPENISIENLSSDIIGQLELMPNIERFPNGKKYELDKYTMFHYLRAQEFEHGKSRIALTNSVNEALLNPSRVYTFFSSDYVKKVNKATEAAMFLGWVEQLVYDFTDETSEVSTTDKIADITIIIPYIGPALNIGNMLYKDDFVGALIFSGAVILLEFIPEIAIPVLGTFALVSYIANKVLTVQTIDNALSKRNEKWDEVYKYIVTNWLAKVNTQIDLIRKKMKEALENQAEATKAIINYQYNQYTEEEKNNINFNIDDLSSKLNESINKAMININKFLNQCSVSYLMNSMIPYGVKRLEDFDASLKDALLKYIYDNRGTLIGQVDRLKDKVNNTLSTDIPFQLSKYVDNQRLLSTFTEYIKNIINTSILNLRYESNHLIDLSRYASKINIGSKVNFDPIDKNQIQLFNLESSKIEVILKNAIVYNSMYENFSTSFWIRIPKYFNSISLNNEYTIINCMENNSGWKVSLNYGEIIWTLQDTQEIKQRVVFKYSQMINISDYINRWIFVTITNNRLNNSKIYINGRLIDQKPISNLGNIHASNNIMFKLDGCRDTHRYIWIKYFNLFDKELNEKEIKDLYDNQSNSGILKDFWGDYLQYDKPYYMLNLYDPNKYVDVNNVGIRGYMYLKGPRGSVMTTNIYLNSSLYRGTKFIIKKYASGNKDNIVRNNDRVYINVVVKNKEYRLATNASQAGVEKILSALEIPDVGNLSQVVVMKSKNDQGIKNKCKMNLQDNNGNDIGFIGFHQFNNIAKLVASNWYNRQIERSSRTLGCSWEFIPVDDGWGERPL

SEQ ID NO: 26 - protein, 1296 aa, Artificial Sequence
  Synthetic
MPFVNKQFNYKDPVNGVDIAYIKIPNAGQMQPVKAFKIHNKIWVIPERDTFTNPEEGDLNPPPEAKQVPVSYYDSTYLSTDNEKDNYLKGVTKLFERIYSTDLGRMLLTSIVRGIPFWGGSTIDTELKVIDTNCINVIQPDGSYRSEELNLVIIGPSADIIQFECKSFGHEVLNLTRNGYGSTQYIRFSPDFTFGFEESLEVDTNPLLGAGKFATDPAVTLAHELIHAGHRLYGIAINPNRVFKVNTNAYYEMSGLEVSFEELRTFGGHDAKFIDSLQENEFRLYYYNKFKDIASTLNKAKSIVGTTASLQYMKNVFKEKYLLSEDTSGKFSVDKLKFDKLYKMLTEIYTEDNFVKFFKVLNRKTYLNFDKAVFKINIVPKVNYTIYDGFNLRNTNLAANFNGQNTEINNMNFTKLKNFTGLFEFYKLLCVRGIITSKTKSLDKGYNKALNDLCIKVNNWDLFFSPSEDNFTNDLNKGEEITSDTNIEAAEENISLDLIQQYYLTFNFDNEPENISIENLSSDIIGQLELMPNIERFPNGKKYELDKYTMFHYLRAQEFEHGKSRIALTNSVNEALLNPSRVYTFFSSDYVKKVNKATEAAMFLGWVEQLVYDFTDETSEVSTTDKIADITIIIPYIGPALNIGNMLYKDDFVGALIFSGAVILLEFIPEIAIPVLGTFALVSYIANKVLTVQTIDNALSKRNEKWDEVYKYIVTNWLAKVNTQIDLIRKKMKEALENQAEATKAIINYQYNQYTEEEKNNINFNIDDLSSKLNESINKAMININKFLNQCSVSYLMNSMIPYGVKRLEDFDASLKDALLKYIYDNRGTLIGQVDRLKDKVNNTLSTDIPFQLSKYVDNQRLLSTFTEYIKNIINTSILNLRYESNHLIDLSRYASKINIGSKVNFDPIDKNQIQLFNLESSKIEVILKNAIVYNSMYENFSTSFWIRIPKYFNSISLNNEYTIINCMENNSGWKVSLNYGEIIWTLQDTQEIKQRVVFKYSQMINISDYINRWIFVTITNNRLNNSKIYINGRLIDQKPISNLGNIHASNNIMFKLDGCRDTHRYIWIKYFNLFDKELNEKEIKDLYDNQSNSGILKDFWGDYLQYDKPYYMLNLYDPNKYVDVNNVGIRGYMYLKGPRGSVMTTNIYLNSSLYRGTKFIIKKYASGNKDNIVRNNDRVYINVVVKNKEYRLATNASQAGVEKILSALEIPDVGNLSQVVVMKSKNDQGITNKCKMNLQDNNGNDIGFIGFHQFNNIAKLVASNWYNRQIGRSSRTLGCSWEFIPVDDGWGERPL

SEQ ID NO: 27 - protein, 1296 aa, Artificial Sequence
  Synthetic
MPFVNKQFNYKDPVNGVDIAYIKIPNAGQMQPVKAFKIHNKIWVIPERDTFTNPEEGDLNPPPEAKQVPVSYYDSTYLSTDNEKDNYLKGVTKLFERIYSTDLGRMLLTSIVRGIPFWGGSTIDTELKVIDTNCINVIQPDGSYRSEELNLVIIGPSADIIQFECKSFGHEVLNLTRNGYGSTQYIRFSPDFTFGFEESLEVDTNPLLGAGKFATDPAVTLAHELIHAGHRLYGIAINPNRVFKVNTNAYYEMSGLEVSFEELRTFGGHDAKFIDSLQENEFRLYYYNKFKDIASTLNKAKSIVGTTASLQYMKNVFKEKYLLSEDTSGKFSVDKLKFDKLYKMLTEIYTEDNFVKFFKVLNRKTYLNFDKAVFKINIVPKVNYTIYDGFNLRNTNLAANFNGQNTEINNMNFTKLKNFTGLFEFYKLLCVRGIITSKTKSLDKGYNKALNDLCIKVNNWDLFFSPSEDNFTNDLNKGEEITSDTNIEAAEENISLDLIQQYYLTFNFDNEPENISIENLSSDIIGQLELMPNIERFPNGKKYELDKYTMFHYLRAQEFEHGKSRIALTNSVNEALLNPSRVYTFFSSDYVKKVNKATEAAMFLGWVEQLVYDFTDETSEVSTTDKIADITIIIPYIGPALNIGNMLYKDDFVGALIFSGAVILLEFIPEIAIPVLGTFALVSYIANKVLTVQTIDNALSKRNEKWDEVYKYIVTNWLAKVNTQIDLIRKKMKEALENQAEATKAIINYQYNQYTEEEKNNINFNIDDLSSKLNESINKAMININKFLNQCSVSYLMNSMIPYGVKRLEDFDASLKDALLKYIYDNRGTLIGQVDRLKDKVNNTLSTDIPFQLSKYVDNQRLLSTFTEYIKNIINTSILNLRYESNHLIDLSRYASKINIGSKVNFDPIDKNQIQLFNLESSKIEVILKNAIVYNSMYENFSTSFWIRIPKYFNSISLNNEYTIINCMENNSGWKVSLNYGEIIWTLQDTQEIKQRVVFKYSQMINISDYINRWIFVTITNNRLNNSKIYINGRLIDQKPISNLGNIHASNNIMFKLDGCRDTHRYIWIKYFNLFDKELNEKEIKDLYDNQSNSGILKDFWGDYLQYDKPYYMLNLYDPNKYVDVNNVGIRGYMYLKGPRGSVMTTNIYLNSSLYRGTKFIIKKYASGNKDNIVRNNDRVYINVVVKNKEYRLATNASQAGVEKILSALEIPDVGNLSQVVVMKSKNDQGITNKCKMNLQDNNGNDIGFIGFHQFNNIAKLVASNWYNRQIERSSRTFGCSWEFIPVDDGWGERPL

SEQ ID NO: 28 - protein, 1296 aa, Artificial Sequence
  Synthetic
MPFVNKQFNYKDPVNGVDIAYIKIPNAGQMQPVKAFKIHNKIWVIPERDTFTNPEEGDLNPPPEAKQVPVSYYDSTYLSTDNEKDNYLKGVTKLFERIYSTDLGRMLLTSIVRGIPFWGGSTIDTELKVIDTNCINVIQPDGSYRSEELNLVIIGPSADIIQFECKSFGHEVLNLTRNGYGSTQYIRFSPDFTFGFEESLEVDTNPLLGAGKFATDPAVTLAHELIHAGHRLYGIAINPNRVFKVNTNAYYEMSGLEVSFEELRTFGGHDAKFIDSLQENEFRLYYYNKFKDIASTLNKAKSIVGTTASLQYMKNVFKEKYLLSEDTSGKFSVDKLKFDKLYKMLTEIYTEDNFVKFFKVLNRKTYLNFDKAVFKINIVPKVNYTIYDGFNLRNTNLAANFNGQNTEINNMNFTKLKNFTGLFEFYKLLCVRGIITSKTKSLDKGYNKALNDLCIKVNNWDLFFSPSEDNFTNDLNKGEEITSDTNIEAAEENISLDLIQQYYLTFNFDNEPENISIENLSSDIIGQLELMPNIERFPNGKKYELDKYTMFHYLRAQEFEHGKSRIALTNSVNEALLNPSRVYTFFSSDYVKKVNKATEAAMFLGWVEQLVYDFTDETSEVSTTDKIADITIIIPYIGPALNIGNMLYKDDFVGALIFSGAVILLEFIPEIAIPVLGTFALVSYIANKVLTVQTIDNALSKRNEKWDEVYKYIVTNWLAKVNTQIDLIRKKMKEALENQAEATKAIINYQYNQYTEEEKNNINFNIDDLSSKLNESINKAMININKFLNQCSVSYLMNSMIPYGVKRLEDFDASLKDALLKYIYDNRGTLIGQVDRLKDKVNNTLSTDIPFQLSKYVDNQRLLSTFTEYIKNIINTSILNLRYESNHLIDLSRYASKINIGSKVNFDPIDKNQIQLFNLESSKIEVILKNAIVYNSMYENFSTSFWIRIPKYFNSISLNNEYTIINCMENNSGWKVSLNYGEIIWTLQDTQEIKQRVVFKYSQMINISDYINRWIFVTITNNRLNNSKIYINGRLIDQKPISNLGNIHASNNIMFKLDGCRDTHRYIWIKYFNLFDKELNEKEIKDLYDNQSNSGILKDFWGDYLQYDKPYYMLNLYDPNKYVDVNNVGIRGYMYLKGPRGSVMTTNIYLNSSLYRGTKFIIKKYASGNKDNIVRNNDRVYINVVVKNKEYRLATNASQAGVEKILSALEIPDVGNLSQVVVMKSKNDQGITNKCKMNLQDNNGNDIGFIGFHQFNNIAKLVASNWYNRQIERSSRTYGCSWEFIPVDDGWGERPL

SEQ ID NO: 29 - protein, 1296 aa, Artificial Sequence
  Synthetic
MPFVNKQFNYKDPVNGVDIAYIKIPNAGQMQPVKAFKIHNKIWVIPERDTFTNPEEGDLNPPPEAKQVPVSYYDSTYLSTDNEKDNYLKGVTKLFERIYSTDLGRMLLTSIVRGIPFWGGSTIDTELKVIDTNCINVIQPDGSYRSEELNLVIIGPSADIIQFECKSFGHEVLNLTRNGYGSTQYIRFSPDFTFGFEESLEVDTNPLLGAGKFATDPAVTLAHELIHAGHRLYGIAINPNRVFKVNTNAYYEMSGLEVSFEELRTFGGHDAKFIDSLQENEFRLYYYNKFKDIASTLNKAKSIVGTTASLQYMKNVFKEKYLLSEDTSGKFSVDKLKFDKLYKMLTEIYTEDNFVKFFKVLNRKTYLNFDKAVFKINIVPKVNYTIYDGFNLRNTNLAANFNGQNTEINNMNFTKLKNFTGLFEFYKLLCVRGIITSKTKSLDKGYNKALNDLCIKVNNWDLFFSPSEDNFTNDLNKGEEITSDTNIEAAEENISLDLIQQYYLTFNFDNEPENISIENLSSDIIGQLELMPNIERFPNGKKYELDKYTMFHYLRAQEFEHGKSRIALTNSVNEALLNPSRVYTFFSSDYVKKVNKATEAAMFLGWVEQLVYDFTDETSEVSTTDKIADITIIIPYIGPALNIGNMLYKDDFVGALIFSGAVILLEFIPEIAIPVLGTFALVSYIANKVLTVQTIDNALSKRNEKWDEVYKYIVTNWLAKVNTQIDLIRKKMKEALENQAEATKAIINYQYNQYTEEEKNNINFNIDDLSSKLNESINKAMININKFLNQCSVSYLMNSMIPYGVKRLEDFDASLKDALLKYIYDNRGTLIGQVDRLKDKVNNTLSTDIPFQLSKYVDNQRLLSTFTEYIKNIINTSILNLRYESNHLIDLSRYASKINIGSKVNFDPIDKNQIQLFNLESSKIEVILKNAIVYNSMYENFSTSFWIRIPKYFNSISLNNEYTIINCMENNSGWKVSLNYGEIIWTLQDTQEIKQRVVFKYSQMINISDYINRWIFVTITNNRLNNSKIYINGRLIDQKPISNLGNIHASNNIMFKLDGCRDTHRYIWIKYFNLFDKELNEKEIKDLYDNQSNSGILKDFWGDYLQYDKPYYMLNLYDPNKYVDVNNVGIRGYMYLKGPRGSVMTTNIYLNSSLYRGTKFIIKKYASGNKDNIVRNNDRVYINVVVKNKEYRLATNASQAGVEKILSALEIPDVGNLSQVVVMKSKNDQGITNKCKMNLQDNNGNDIGFIGFHQFNNIAKLVASNWYNRQIERSSRTWGCSWEFIPVDDGWGERPL

SEQ ID NO: 30 - protein, 1296 aa, Artificial Sequence
  Synthetic
MPFVNKQFNYKDPVNGVDIAYIKIPNAGQMQPVKAFKIHNKIWVIPERDTFTNPEEGDLNPPPEAKQVPVSYYDSTYLSTDNEKDNYLKGVTKLFERIYSTDLGRMLLTSIVRGIPFWGGSTIDTELKVIDTNCINVIQPDGSYRSEELNLVIIGPSADIIQFECKSFGHEVLNLTRNGYGSTQYIRFSPDFTFGFEESLEVDTNPLLGAGKFATDPAVTLAHELIHAGHRLYGIAINPNRVFKVNTNAYYEMSGLEVSFEELRTFGGHDAKFIDSLQENEFRLYYYNKFKDIASTLNKAKSIVGTTASLQYMKNVFKEKYLLSEDTSGKFSVDKLKFDKLYKMLTEIYTEDNFVKFFKVLNRKTYLNFDKAVFKINIVPKVNYTIYDGFNLRNTNLAANFNGQNTEINNMNFTKLKNFTGLFEFYKLLCVRGIITSKTKSLDKGYNKALNDLCIKVNNWDLFFSPSEDNFTNDLNKGEEITSDTNIEAAEENISLDLIQQYYLTFNFDNEPENISIENLSSDIIGQLELMPNIERFPNGKKYELDKYTMFHYLRAQEFEHGKSRIALTNSVNEALLNPSRVYTFFSSDYVKKVNKATEAAMFLGWVEQLVYDFTDETSEVSTTDKIADITIIIPYIGPALNIGNMLYKDDFVGALIFSGAVILLEFIPEIAIPVLGTFALVSYIANKVLTVQTIDNALSKRNEKWDEVYKYIVTNWLAKVNTQIDLIRKKMKEALENQAEATKAIINYQYNQYTEEEKNNINFNIDDLSSKLNESINKAMININKFLNQCSVSYLMNSMIPYGVKRLEDFDASLKDALLKYIYDNRGTLIGQVDRLKDKVNNTLSTDIPFQLSKYVDNQRLLSTFTEYIKNIINTSILNLRYESNHLIDLSRYASKINIGSKVNFDPIDKNQIQLFNLESSKIEVILKNAIVYNSMYENFSTSFWIRIPKYFNSISLNNEYTIINCMENNSGWKVSLNYGEIIWTLQDTQEIKQRVVFKYSQMINISDYINRWIFVTITNNRLNNSKIYINGRLIDQKPISNLGNIHASNNIMFKLDGCRDTHRYIWIKYFNLFDKELNEKEIKDLYDNQSNSGILKDFWGDYLQYDKPYYMLNLYDPNKYVDVNNVGIRGYMYLKGPRGSVMTTNIYLNSSLYRGTKFIIKKYASGNKDNIVRNNDRVYINVVVKNKEYRLATNASQAGVEKILSALEIPDVGNLSQVVVMKSKNDQGITNKCKMNLQDNNGNDIGFIGFHQFNNIAKLVASNWYNRQIERSSRTLGCSWEFIPVEDGWGERPL

SEQ ID NO: 31 - protein, 1296 aa, Artificial Sequence
  Synthetic
MPFVNKQFNYKDPVNGVDIAYIKIPNAGQMQPVKAFKIHNKIWVIPERDTFTNPEEGDLNPPPEAKQVPVSYYDSTYLSTDNEKDNYLKGVTKLFERIYSTDLGRMLLTSIVRGIPFWGGSTIDTELKVIDTNCINVIQPDGSYRSEELNLVIIGPSADIIQFECKSFGHEVLNLTRNGYGSTQYIRFSPDFTFGFEESLEVDTNPLLGAGKFATDPAVTLAHELIHAGHRLYGIAINPNRVFKVNTNAYYEMSGLEVSFEELRTFGGHDAKFIDSLQENEFRLYYYNKFKDIASTLNKAKSIVGTTASLQYMKNVFKEKYLLSEDTSGKFSVDKLKFDKLYKMLTEIYTEDNFVKFFKVLNRKTYLNFDKAVFKINIVPKVNYTIYDGFNLRNTNLAANFNGQNTEINNMNFTKLKNFTGLFEFYKLLCVRGIITSKTKSLDKGYNKALNDLCIKVNNWDLFFSPSEDNFTNDLNKGEEITSDTNIEAAEENISLDLIQQYYLTFNFDNEPENISIENLSSDIIGQLELMPNIERFPNGKKYELDKYTMFHYLRAQEFEHGKSRIALTNSVNEALLNPSRVYTFFSSDYVKKVNKATEAAMFLGWVEQLVYDFTDETSEVSTTDKIADITIIIPYIGPALNIGNMLYKDDFVGALIFSGAVILLEFIPEIAIPVLGTFALVSYIANKVLTVQTIDNALSKRNEKWDEVYKYIVTNWLAKVNTQIDLIRKKMKEALENQAEATKAIINYQYNQYTEEEKNNINFNIDDLSSKLNESINKAMININKFLNQCSVSYLMNSMIPYGVKRLEDFDASLKDALLKYIYDNRGTLIGQVDRLKDKVNNTLSTDIPFQLSKYVDNQRLLSTFTEYIKNIINTSILNLRYESNHLIDLSRYASKINIGSKVNFDPIDKNQIQLFNLESSKIEVILKNAIVYNSMYENFSTSFWIRIPKYFNSISLNNEYTIINCMENNSGWKVSLNYGEIIWTLQDTQEIKQRVVFKYSQMINISDYINRWIFVTITNNRLNNSKIYINGRLIDQKPISNLGNIHASNNIMFKLDGCRDTHRYIWIKYFNLFDKELNEKEIKDLYDNQSNSGILKDFWGDYLQYDKPYYMLNLYDPNKYVDVNNVGIRGYMYLKGPRGSVMTTNIYLNSSLYRGTKFIIKKYASGNKDNIVRNNDRVYINVVVKNKEYRLATNASQAGVEKILSALEIPDVGNLSQVVVMKSKNDQGITNKCKMNLQDNNGNDIGFIGFHQFNNIAKLVASNWYNRQIERSSRTLGCSWEFIPVDYGWGERPL

SEQ ID NO: 32 - protein, 1296 aa, Artificial Sequence
  Synthetic
MPFVNKQFNYKDPVNGVDIAYIKIPNAGQMQPVKAFKIHNKIWVIPERDTFTNPEEGDLNPPPEAKQVPVSYYDSTYLSTDNEKDNYLKGVTKLFERIYSTDLGRMLLTSIVRGIPFWGGSTIDTELKVIDTNCINVIQPDGSYRSEELNLVIIGPSADIIQFECKSFGHEVLNLTRNGYGSTQYIRFSPDFTFGFEESLEVDTNPLLGAGKFATDPAVTLAHELIHAGHRLYGIAINPNRVFKVNTNAYYEMSGLEVSFEELRTFGGHDAKFIDSLQENEFRLYYYNKFKDIASTLNKAKSIVGTTASLQYMKNVFKEKYLLSEDTSGKFSVDKLKFDKLYKMLTEIYTEDNFVKFFKVLNRKTYLNFDKAVFKINIVPKVNYTIYDGFNLRNTNLAANFNGQNTEINNMNFTKLKNFTGLFEFYKLLCVRGIITSKTKSLDKGYNKALNDLCIKVNNWDLFFSPSEDNFTNDLNKGEEITSDTNIEAAEENISLDLIQQYYLTFNFDNEPENISIENLSSDIIGQLELMPNIERFPNGKKYELDKYTMFHYLRAQEFEHGKSRIALTNSVNEALLNPSRVYTFFSSDYVKKVNKATEAAMFLGWVEQLVYDFTDETSEVSTTDKIADITIIIPYIGPALNIGNMLYKDDFVGALIFSGAVILLEFIPEIAIPVLGTFALVSYIANKVLTVQTIDNALSKRNEKWDEVYKYIVTNWLAKVNTQIDLIRKKMKEALENQAEATKAIINYQYNQYTEEEKNNINFNIDDLSSKLNESINKAMININKFLNQCSVSYLMNSMIPYGVKRLEDFDASLKDALLKYIYDNRGTLIGQVDRLKDKVNNTLSTDIPFQLSKYVDNQRLLSTFTEYIKNIINTSILNLRYESNHLIDLSRYASKINIGSKVNFDPIDKNQIQLFNLESSKIEVILKNAIVYNSMYENFSTSFWIRIPKYFNSISLNNEYTIINCMENNSGWKVSLNYGEIIWTLQDTQEIKQRVVFKYSQMINISDYINRWIFVTITNNRLNNSKIYINGRLIDQKPISNLGNIHASNNIMFKLDGCRDTHRYIWIKYFNLFDKELNEKEIKDLYDNQSNSGILKDFWGDYLQYDKPYYMLNLYDPNKYVDVNNVGIRGYMYLKGPRGSVMTTNIYLNSSLYRGTKFIIKKYASGNKDNIVRNNDRVYINVVVKNKEYRLATNASQAGVEKILSALEIPDVGNLSQVVVMKSKNDQGITNKCKMNLQDNNGNDIGFIGFHQFNNIAKLVASNWYNRQIERSSRTLGCSWEFIPVDDGWRERPL

SEQ ID NO: 33 - protein, 1296 aa, Artificial Sequence
  Synthetic
MPFVNKQFNYKDPVNGVDIAYIKIPNAGQMQPVKAFKIHNKIWVIPERDTFTNPEEGDLNPPPEAKQVPVSYYDSTYLSTDNEKDNYLKGVTKLFERIYSTDLGRMLLTSIVRGIPFWGGSTIDTELKVIDTNCINVIQPDGSYRSEELNLVIIGPSADIIQFECKSFGHEVLNLTRNGYGSTQYIRFSPDFTFGFEESLEVDTNPLLGAGKFATDPAVTLAHELIHAGHRLYGIAINPNRVFKVNTNAYYEMSGLEVSFEELRTFGGHDAKFIDSLQENEFRLYYYNKFKDIASTLNKAKSIVGTTASLQYMKNVFKEKYLLSEDTSGKFSVDKLKFDKLYKMLTEIYTEDNFVKFFKVLNRKTYLNFDKAVFKINIVPKVNYTIYDGFNLRNTNLAANFNGQNTEINNMNFTKLKNFTGLFEFYKLLCVRGIITSKTKSLDKGYNKALNDLCIKVNNWDLFFSPSEDNFTNDLNKGEEITSDTNIEAAEENISLDLIQQYYLTFNFDNEPENISIENLSSDIIGQLELMPNIERFPNGKKYELDKYTMFHYLRAQEFEHGKSRIALTNSVNEALLNPSRVYTFFSSDYVKKVNKATEAAMFLGWVEQLVYDFTDETSEVSTTDKIADITIIIPYIGPALNIGNMLYKDDFVGALIFSGAVILLEFIPEIAIPVLGTFALVSYIANKVLTVQTIDNALSKRNEKWDEVYKYIVTNWLAKVNTQIDLIRKKMKEALENQAEATKAIINYQYNQYTEEEKNNINFNIDDLSSKLNESINKAMININKFLNQCSVSYLMNSMIPYGVKRLEDFDASLKDALLKYIYDNRGTLIGQVDRLKDKVNNTLSTDIPFQLSKYVDNQRLLSTFTEYIKNIINTSILNLRYESNHLIDLSRYASKINIGSKVNFDPIDKNQIQLFNLESSKIEVILKNAIVYNSMYENFSTSFWIRIPKYFNSISLNNEYTIINCMENNSGWKVSLNYGEIIWTLQDTQEIKQRVVFKYSQMINISDYINRWIFVTITNNRLNNSKIYINGRLIDQKPISNLGNIHASNNIMFKLDGCRDTHRYIWIKYFNLFDKELNEKEIKDLYDNQSNSGILKDFWGDYLQYDKPYYMLNLYDPNKYVDVNNVGIRGYMYLKGPRGSVMTTNIYLNSSLYRGTKFIIKKYASGNKDNIVRNNDRVYINVVVKNKEYRLATNASQAGVEKILSALEIPDVGNLSQVVVMKSKNDQGITNKCKMNLQDNNGNDIGFIGFHQFNNIAKLVASNWYNRQIERSSRTLGCSWEFIPVDDGWKERPL

SEQ ID NO: 34 - protein, 1296 aa, Artificial Sequence
  Synthetic
MPFVNKQFNYKDPVNGVDIAYIKIPNAGQMQPVKAFKIHNKIWVIPERDTFTNPEEGDLNPPPEAKQVPVSYYDSTYLSTDNEKDNYLKGVTKLFERIYSTDLGRMLLTSIVRGIPFWGGSTIDTELKVIDTNCINVIQPDGSYRSEELNLVIIGPSADIIQFECKSFGHEVLNLTRNGYGSTQYIRFSPDFTFGFEESLEVDTNPLLGAGKFATDPAVTLAHELIHAGHRLYGIAINPNRVFKVNTNAYYEMSGLEVSFEELRTFGGHDAKFIDSLQENEFRLYYYNKFKDIASTLNKAKSIVGTTASLQYMKNVFKEKYLLSEDTSGKFSVDKLKFDKLYKMLTEIYTEDNFVKFFKVLNRKTYLNFDKAVFKINIVPKVNYTIYDGFNLRNTNLAANFNGQNTEINNMNFTKLKNFTGLFEFYKLLCVRGIITSKTKSLDKGYNKALNDLCIKVNNWDLFFSPSEDNFTNDLNKGEEITSDTNIEAAEENISLDLIQQYYLTFNFDNEPENISIENLSSDIIGQLELMPNIERFPNGKKYELDKYTMFHYLRAQEFEHGKSRIALTNSVNEALLNPSRVYTFFSSDYVKKVNKATEAAMFLGWVEQLVYDFTDETSEVSTTDKIADITIIIPYIGPALNIGNMLYKDDFVGALIFSGAVILLEFIPEIAIPVLGTFALVSYIANKVLTVQTIDNALSKRNEKWDEVYKYIVTNWLAKVNTQIDLIRKKMKEALENQAEATKAIINYQYNQYTEEEKNNINFNIDDLSSKLNESINKAMININKFLNQCSVSYLMNSMIPYGVKRLEDFDASLKDALLKYIYDNRGTLIGQVDRLKDKVNNTLSTDIPFQLSKYVDNQRLLSTFTEYIKNIINTSILNLRYESNHLIDLSRYASKINIGSKVNFDPIDKNQIQLFNLESSKIEVILKNAIVYNSMYENFSTSFWIRIPKYFNSISLNNEYTIINCMENNSGWKVSLNYGEIIWTLQDTQEIKQRVVFKYSQMINISDYINRWIFVTITNNRLNNSKIYINGRLIDQKPISNLGNIHASNNIMFKLDGCRDTHRYIWIKYFNLFDKELNEKEIKDLYDNQSNSGILKDFWGDYLQYDKPYYMLNLYDPNKYVDVNNVGIRGYMYLKGPRGSVMTTNIYLNSSLYRGTKFIIKKYASGNKDNIVRNNDRVYINVVVKNKEYRLATNASQAGVEKILSALEIPDVGNLSQVVVMKSKNDQGITNKCKMNLQDNNGNDIGFIGFHQFNNIAKLVASNWYNRQIERSSRTLGCSWEFIPVDDGWGESPL

SEQ ID NO: 35 - protein, 1296 aa, Artificial Sequence
  Synthetic
MPFVNKQFNYKDPVNGVDIAYIKIPNAGQMQPVKAFKIHNKIWVIPERDTFTNPEEGDLNPPPEAKQVPVSYYDSTYLSTDNEKDNYLKGVTKLFERIYSTDLGRMLLTSIVRGIPFWGGSTIDTELKVIDTNCINVIQPDGSYRSEELNLVIIGPSADIIQFECKSFGHEVLNLTRNGYGSTQYIRFSPDFTFGFEESLEVDTNPLLGAGKFATDPAVTLAHELIHAGHRLYGIAINPNRVFKVNTNAYYEMSGLEVSFEELRTFGGHDAKFIDSLQENEFRLYYYNKFKDIASTLNKAKSIVGTTASLQYMKNVFKEKYLLSEDTSGKFSVDKLKFDKLYKMLTEIYTEDNFVKFFKVLNRKTYLNFDKAVFKINIVPKVNYTIYDGFNLRNTNLAANFNGQNTEINNMNFTKLKNFTGLFEFYKLLCVRGIITSKTKSLDKGYNKALNDLCIKVNNWDLFFSPSEDNFTNDLNKGEEITSDTNIEAAEENISLDLIQQYYLTFNFDNEPENISIENLSSDIIGQLELMPNIERFPNGKKYELDKYTMFHYLRAQEFEHGKSRIALTNSVNEALLNPSRVYTFFSSDYVKKVNKATEAAMFLGWVEQLVYDFTDETSEVSTTDKIADITIIIPYIGPALNIGNMLYKDDFVGALIFSGAVILLEFIPEIAIPVLGTFALVSYIANKVLTVQTIDNALSKRNEKWDEVYKYIVTNWLAKVNTQIDLIRKKMKEALENQAEATKAIINYQYNQYTEEEKNNINFNIDDLSSKLNESINKAMININKFLNQCSVSYLMNSMIPYGVKRLEDFDASLKDALLKYIYDNRGTLIGQVDRLKDKVNNTLSTDIPFQLSKYVDNQRLLSTFTEYIKNIINTSILNLRYESNHLIDLSRYASKINIGSKVNFDPIDKNQIQLFNLESSKIEVILKNAIVYNSMYENFSTSFWIRIPKYFNSISLNNEYTIINCMENNSGWKVSLNYGEIIWTLQDTQEIKQRVVFKYSQMINISDYINRWIFVTITNNRLNNSKIYINGRLIDQKPISNLGNIHASNNIMFKLDGCRDTHRYIWIKYFNLFDKELNEKEIKDLYDNQSNSGILKDFWGDYLQYDKPYYMLNLYDPNKYVDVNNVGIRGYMYLKGPRGSVMTTNIYLNSSLYRGTKFIIKKYASGNKDNIVRNNDRVYINVVVKNKEYRLATNASQAGVEKILSALEIPDVGNLSQVVVMKSKNDQGITNKCKMNLQDNNGNDIGFIGFHQFNNIAKLVASNWYNRQIERSSRTLGCSWEFIPVDDGWGETPL

SEQ ID NO: 36 - protein, 1296 aa, Artificial Sequence
  Synthetic
MPFVNKQFNYKDPVNGVDIAYIKIPNAGQMQPVKAFKIHNKIWVIPERDTFTNPEEGDLNPPPEAKQVPVSYYDSTYLSTDNEKDNYLKGVTKLFERIYSTDLGRMLLTSIVRGIPFWGGSTIDTELKVIDTNCINVIQPDGSYRSEELNLVIIGPSADIIQFECKSFGHEVLNLTRNGYGSTQYIRFSPDFTFGFEESLEVDTNPLLGAGKFATDPAVTLAHELIHAGHRLYGIAINPNRVFKVNTNAYYEMSGLEVSFEELRTFGGHDAKFIDSLQENEFRLYYYNKFKDIASTLNKAKSIVGTTASLQYMKNVFKEKYLLSEDTSGKFSVDKLKFDKLYKMLTEIYTEDNFVKFFKVLNRKTYLNFDKAVFKINIVPKVNYTIYDGFNLRNTNLAANFNGQNTEINNMNFTKLKNFTGLFEFYKLLCVRGIITSKTKSLDKGYNKALNDLCIKVNNWDLFFSPSEDNFTNDLNKGEEITSDTNIEAAEENISLDLIQQYYLTFNFDNEPENISIENLSSDIIGQLELMPNIERFPNGKKYELDKYTMFHYLRAQEFEHGKSRIALTNSVNEALLNPSRVYTFFSSDYVKKVNKATEAAMFLGWVEQLVYDFTDETSEVSTTDKIADITIIIPYIGPALNIGNMLYKDDFVGALIFSGAVILLEFIPEIAIPVLGTFALVSYIANKVLTVQTIDNALSKRNEKWDEVYKYIVTNWLAKVNTQIDLIRKKMKEALENQAEATKAIINYQYNQYTEEEKNNINFNIDDLSSKLNESINKAMININKFLNQCSVSYLMNSMIPYGVKRLEDFDASLKDALLKYIYDNRGTLIGQVDRLKDKVNNTLSTDIPFQLSKYVDNQRLLSTFTEYIKNIINTSILNLRYESNHLIDLSRYASKINIGSKVNFDPIDKNQIQLFNLESSKIEVILKNAIVYNSMYENFSTSFWIRIPKYFNSISLNNEYTIINCMENNSGWKVSLNYGEIIWTLQDTQEIKQRVVFKYSQMINISDYINRWIFVTITNNRLNNSKIYINGRLIDQKPISNLGNIHASNNIMFKLDGCRDTHRYIWIKYFNLFDKELNEKEIKDLYDNQSNSGILKDFWGDYLQYDKPYYMLNLYDPNKYVDVNNVGIRGYMYLKGPRGSVMTTNIYLNSSLYRGTKFIIKKYASGNKDNIVRNNDRVYINVVVKNKEYRLATNASQAGVEKILSALEIPDVGNLSQVVVMKSKNDQGITNKCKMNLQDNNGNDIGFIGFHQFNNIAKLVASNWYNRQIERSSRTLGCSWEFIPVDDGWGERSL

SEQ ID NO: 37 - protein, 1296 aa, Artificial Sequence
  Synthetic
MPFVNKQFNYKDPVNGVDIAYIKIPNAGQMQPVKAFKIHNKIWVIPERDTFTNPEEGDLNPPPEAKQVPVSYYDSTYLSTDNEKDNYLKGVTKLFERIYSTDLGRMLLTSIVRGIPFWGGSTIDTELKVIDTNCINVIQPDGSYRSEELNLVIIGPSADIIQFECKSFGHEVLNLTRNGYGSTQYIRFSPDFTFGFEESLEVDTNPLLGAGKFATDPAVTLAHELIHAGHRLYGIAINPNRVFKVNTNAYYEMSGLEVSFEELRTFGGHDAKFIDSLQENEFRLYYYNKFKDIASTLNKAKSIVGTTASLQYMKNVFKEKYLLSEDTSGKFSVDKLKFDKLYKMLTEIYTEDNFVKFFKVLNRKTYLNFDKAVFKINIVPKVNYTIYDGFNLRNTNLAANFNGQNTEINNMNFTKLKNFTGLFEFYKLLCVRGIITSKTKSLDKGYNKALNDLCIKVNNWDLFFSPSEDNFTNDLNKGEEITSDTNIEAAEENISLDLIQQYYLTFNFDNEPENISIENLSSDIIGQLELMPNIERFPNGKKYELDKYTMFHYLRAQEFEHGKSRIALTNSVNEALLNPSRVYTFFSSDYVKKVNKATEAAMFLGWVEQLVYDFTDETSEVSTTDKIADITIIIPYIGPALNIGNMLYKDDFVGALIFSGAVILLEFIPEIAIPVLGTFALVSYIANKVLTVQTIDNALSKRNEKWDEVYKYIVTNWLAKVNTQIDLIRKKMKEALENQAEATKAIINYQYNQYTEEEKNNINFNIDDLSSKLNESINKAMININKFLNQCSVSYLMNSMIPYGVKRLEDFDASLKDALLKYIYDNRGTLIGQVDRLKDKVNNTLSTDIPFQLSKYVDNQRLLSTFTEYIKNIINTSILNLRYESNHLIDLSRYASKINIGSKVNFDPIDKNQIQLFNLESSKIEVILKNAIVYNSMYENFSTSFWIRIPKYFNSISLNNEYTIINCMENNSGWKVSLNYGEIIWTLQDTQEIKQRVVFKYSQMINISDYINRWIFVTITNNRLNNSKIYINGRLIDQKPISNLGNIHASNNIMFKLDGCRDTHRYIWIKYFNLFDKELNEKEIKDLYDNQSNSGILKDFWGDYLQYDKPYYMLNLYDPNKYVDVNNVGIRGYMYLKGPRGSVMTTNIYLNSSLYRGTKFIIKKYASGNKDNIVRNNDRVYINVVVKNKEYRLATNASQAGVEKILSALEIPDVGNLSQVVVMKSKNDQGITNKCKMNLQDNNGNDIGFIGFHQFNNIAKLVASNWYNRQIERSSRTLGCSWEFIPVDDGWGERTL

SEQ ID NO: 38 - protein, 1296 aa, Artificial Sequence
  Synthetic
MPFVNKQFNYKDPVNGVDIAYIKIPNAGQMQPVKAFKIHNKIWVIPERDTFTNPEEGDLNPPPEAKQVPVSYYDSTYLSTDNEKDNYLKGVTKLFERIYSTDLGRMLLTSIVRGIPFWGGSTIDTELKVIDTNCINVIQPDGSYRSEELNLVIIGPSADIIQFECKSFGHDVLNLTRNGYGSTQYIRFSPDFTFGFEESLEVDTNPLLGAGKFATDPAVTLAHELIHAEHRLYGIAINPNRVFKVNTNAYYEMSGLEVSFEELRTFGGHDAKFIDSLQENEFRLYYYNKFKDVASTLNKAKSIIGTTASLQYMKNVFKEKYLLSEDTSGKFSVDKLKFDKLYKMLTEIYTEDNFVNFFKVINRKTYLNFDKAVFRINIVPDENYTIKDGFNLKGANLSTNFNGQNTEINSRNFTRLKNFTGLFEFYKLLCVRGIIPFKTKSLDEGYNKALNDLCIKVNNWDLFFSPSEDNFTNDLDKVEEITADTNIEAAEENISLDLIQQYYLTFDFDNEPENISIENLSSDIIGQLEPMPNIERFPNGKKYELDKYTMFHYLRAQEFEHGDSRIILTNSAEEALLKPNVAYTFFSSKYVKKINKAVEAFMFLNWAEELVYDFTDETNEVTTMDKIADITIIVPYIGPALNIGNMLSKGEFVEAIIFTGVVAMLEFIPEYALPVFGTFAIVSYIANKVLTVQTINNALSKRNEKWDEVYKYTVTNWLAKVNTQIDLIREKMKKALENQAEATKAIINYQYNQYTEEEKNNINFNIDDLSSKLNESINSAMININKFLDQCSVSYLMNSMIPYAVKRLKDFDASVRDVLLKYIYDNRGTLVLQVDRLKDEVNNTLSADIPFQLSKYVDNKKLLSTFTEYIKNIVNTSILSIVYKKDDLIDLSRYGAKINIGDRVYYDSIDKNQIQLINLESSTIEVILKNAIVYNSMYENFSTSFWIKIPKYFSKINLNNEYTIINCIENNSGWKVSLNYGEIIWTLQDNKQNIQRVVFKYSQMVNISDYINRWIFVTITNNRLTKSKIYINGRLIDQKPISNLGNIHASNKIMFKLDGCRDPRRYIMIKYFNLFDKELNEKEIKDLYDSQSNSGILKDFWGNYLQYDKPYYMLNLFDPNKYVDVNNIGIRGYMYLKGPRGSVVTTNIYLNSTLYEGTKFIIKKYASGNEDNIVRNNDRVYINVVVKNKEYRLATNASQAGVEKILSALEIPDVGNLSQVVVMKSKDDQGIRNKCKMNLQDNNGNDIGFIGFHLYDNIAKLVASNWYNRQVGKASRTFGCSWEFIPVDDGWGESSL

SEQ ID NO: 39 - protein, 1296 aa, Artificial Sequence
  Synthetic
MPFVNKQFNYKDPVNGVDIAYIKIPNAGQMQPVKAFKIHNKIWVIPERDTFTNPEEGDLNPPPEAKQVPVSYYDSTYLSTDNEKDNYLKGVTKLFERIYSTDLGRMLLTSIVRGIPFWGGSTIDTELKVIDTNCINVIQPDGSYRSEELNLVIIGPSADIIQFECKSFGHDVLNLTRNGYGSTQYIRFSPDFTFGFEESLEVDTNPLLGAGKFATDPAVTLAHELIHAEHRLYGIAINPNRVFKVNTNAYYEMSGLEVSFEELRTFGGHDAKFIDSLQENEFRLYYYNKFKDVASTLNKAKSIIGTTASLQYMKNVFKEKYLLSEDTSGKFSVDKLKFDKLYKMLTEIYTEDNFVNFFKVINRKTYLNFDKAVFRINIVPDENYTIKDGFNLKGANLSTNFNGQNTEINSRNFTRLKNFTGLFEFYKLLCVRGIIPFKTKSLDEGYNKALNDLCIKVNNWDLFFSPSEDNFTNDLDKVEEITADTNIEAAEENISLDLIQQYYLTFDFDNEPENISIENLSSDIIGQLEPMPNIERFPNGKKYELDKYTMFHYLRAQEFEHGDSRIILTNSAEEALLKPNVAYTFFSSKYVKKINKAVEAFMFLNWAEELVYDFTDETNEVTTMDKIADITIIVPYIGPALNIGNMLSKGEFVEAIIFTGVVAMLEFIPEYALPVFGTFAIVSYIANKVLTVQTINNALSKRNEKWDEVYKYTVTNWLAKVNTQIDLIREKMKKALENQAEATKAIINYQYNQYTEEEKNNINFNIDDLSSKLNESINSAMININKFLDQCSVSYLMNSMIPYAVKRLKDFDASVRDVLLKYIYDNRGTLVLQVDRLKDEVNNTLSADIPFQLSKYVDNKKLLSTFTEYIKNIVNTSILSIVYKKDDLIDLSRYGAKINIGDRVYYDSIDKNQIKLINLESSKIEVILKNAIVYNSMYENFSTSFWIKIPKYFSKINLNNEYTIINCIENNSGWKVSLNYGEIIWTLQDNKQNIQRVVFKYSQMVNISDYINRWIFVTITNNRLTKSKIYINGRLIDQKPISNLGNIHASNKIMFKLDGCRDPRRYIMIKYFNLFDKELNEKEIKDLYDSQSNSGILKDFWGNYLQYDKPYYMLNLFDPNKYVDVNNIGIRGYMYLKGPRGSVVTTNIYLNSTLYEGTKFIIKKYASGNEDNIVRNNDRVYINVVVKNKEYRLATNASQAGVEKILSALEIPDVGNLSQVVVMKSKDDQGIRNKCKMNLQDNNGNDIGFIGFHLYDNIAKLVASNWYNRQVGKASRTFGCSWEFIPVDDGWGESSL

SEQ ID NO: 40 - protein, 1296 aa, Artificial Sequence
  Synthetic
MPFVNKQFNYKDPVNGVDIAYIKIPNAGQMQPVKAFKIHNKIWVIPERDTFTNPEEGDLNPPPEAKQVPVSYYDSTYLSTDNEKDNYLKGVTKLFERIYSTDLGRMLLTSIVRGIPFWGGSTIDTELKVIDTNCINVIQPDGSYRSEELNLVIIGPSADIIQFECKSFGHDVLNLTRNGYGSTQYIRFSPDFTFGFEESLEVDTNPLLGAGKFATDPAVTLAHELIHAEHRLYGIAINPNRVFKVNTNAYYEMSGLEVSFEELRTFGGHDAKFIDSLQENEFRLYYYNKFKDVASTLNKAKSIIGTTASLQYMKNVFKEKYLLSEDTSGKFSVDKLKFDKLYKMLTEIYTEDNFVNFFKVINRKTYLNFDKAVFRINIVPDENYTIKDGFNLKGANLSTNFNGQNTEINSRNFTRLKNFTGLFEFYKLLCVRGIIPFKTKSLDEGYNKALNDLCIKVNNWDLFFSPSEDNFTNDLDKVEEITADTNIEAAEENISLDLIQQYYLTFDFDNEPENISIENLSSDIIGQLEPMPNIERFPNGKKYELDKYTMFHYLRAQEFEHGDSRIILTNSAEEALLKPNVAYTFFSSKYVKKINKAVEAFMFLNWAEELVYDFTDETNEVTTMDKIADITIIVPYIGPALNIGNMLSKGEFVEAIIFTGVVAMLEFIPEYALPVFGTFAIVSYIANKVLTVQTINNALSKRNEKWDEVYKYTVTNWLAKVNTQIDLIREKMKKALENQAEATKAIINYQYNQYTEEEKNNINFNIDDLSSKLNESINSAMININKFLDQCSVSYLMNSMIPYAVKRLKDFDASVRDVLLKYIYDNRGTLVLQVDRLKDEVNNTLSADIPFQLSKYVDNKKLLSTFTEYIKNIVNTSILSIVYKKDDLIDLSRYGAKINIGDRVYYDSIDKNQIKLINLESSTIEVILKNAIVYNSMYENFSTSFWIKIPKYFSKINLNNEYTIINCIENNSGWKVSLNYGEIIWTLQDNKQNIQRVVFKYSQMVNISDYINRWIFVTITNNRLTKSKIYINGRLIDQKPISNLGNIHASNKIMFKLDGCRDPRRYIMIKYFNLFDKELNEKEIKDLYDNQSNSGILKDFWGNYLQYDKPYYMLNLFDPNKYVDVNNIGIRGYMYLKGPRGSVVTTNIYLNSTLYEGTKFIIKKYASGNEDNIVRNNDRVYINVVVKNKEYRLATNASQAGVEKILSALEIPDVGNLSQVVVMKSKDDQGIRNKCKMNLQDNNGNDIGFIGFHLYDNIAKLVASNWYNRQVGKASRTFGCSWEFIPVDDGWGESSL

SEQ ID NO: 41 - protein, 1296 aa, Artificial Sequence
  Synthetic
MPFVNKQFNYKDPVNGVDIAYIKIPNAGQMQPVKAFKIHNKIWVIPERDTFTNPEEGDLNPPPEAKQVPVSYYDSTYLSTDNEKDNYLKGVTKLFERIYSTDLGRMLLTSIVRGIPFWGGSTIDTELKVIDTNCINVIQPDGSYRSEELNLVIIGPSADIIQFECKSFGHDVLNLTRNGYGSTQYIRFSPDFTFGFEESLEVDTNPLLGAGKFATDPAVTLAHELIHAEHRLYGIAINPNRVFKVNTNAYYEMSGLEVSFEELRTFGGHDAKFIDSLQENEFRLYYYNKFKDVASTLNKAKSIIGTTASLQYMKNVFKEKYLLSEDTSGKFSVDKLKFDKLYKMLTEIYTEDNFVNFFKVINRKTYLNFDKAVFRINIVPDENYTIKDGFNLKGANLSTNFNGQNTEINSRNFTRLKNFTGLFEFYKLLCVRGIIPFKTKSLDEGYNKALNDLCIKVNNWDLFFSPSEDNFTNDLDKVEEITADTNIEAAEENISLDLIQQYYLTFDFDNEPENISIENLSSDIIGQLEPMPNIERFPNGKKYELDKYTMFHYLRAQEFEHGDSRIILTNSAEEALLKPNVAYTFFSSKYVKKINKAVEAFMFLNWAEELVYDFTDETNEVTTMDKIADITIIVPYIGPALNIGNMLSKGEFVEAIIFTGVVAMLEFIPEYALPVFGTFAIVSYIANKVLTVQTINNALSKRNEKWDEVYKYTVTNWLAKVNTQIDLIREKMKKALENQAEATKAIINYQYNQYTEEEKNNINFNIDDLSSKLNESINSAMININKFLDQCSVSYLMNSMIPYAVKRLKDFDASVRDVLLKYIYDNRGTLVLQVDRLKDEVNNTLSADIPFQLSKYVDNKKLLSTFTEYIKNIVNTSILSIVYKKDDLIDLSRYGAKINIGDRVYYDSIDKNQIKLINLESSTIEVILKNAIVYNSMYENFSTSFWIKIPKYFSKINLNNEYTIINCIENNSGWKVSLNYGEIIWTLQDNKQNIQRVVFKYSQMVNISDYINRWIFVTITNNRLTKSKIYINGRLIDQKPISNLGNIHASNKIMFKLDGCRDPRRYIMIKYFNLFDKELNEKEIKDLYDSQSNSGILKDFWGDYLQYDKPYYMLNLFDPNKYVDVNNIGIRGYMYLKGPRGSVVTTNIYLNSTLYEGTKFIIKKYASGNEDNIVRNNDRVYINVVVKNKEYRLATNASQAGVEKILSALEIPDVGNLSQVVVMKSKDDQGIRNKCKMNLQDNNGNDIGFIGFHLYDNIAKLVASNWYNRQVGKASRTFGCSWEFIPVDDGWGESSL

SEQ ID NO: 42 - protein, 1296 aa, Artificial Sequence
  Synthetic
MPFVNKQFNYKDPVNGVDIAYIKIPNAGQMQPVKAFKIHNKIWVIPERDTFTNPEEGDLNPPPEAKQVPVSYYDSTYLSTDNEKDNYLKGVTKLFERIYSTDLGRMLLTSIVRGIPFWGGSTIDTELKVIDTNCINVIQPDGSYRSEELNLVIIGPSADIIQFECKSFGHDVLNLTRNGYGSTQYIRFSPDFTFGFEESLEVDTNPLLGAGKFATDPAVTLAHELIHAEHRLYGIAINPNRVFKVNTNAYYEMSGLEVSFEELRTFGGHDAKFIDSLQENEFRLYYYNKFKDVASTLNKAKSIIGTTASLQYMKNVFKEKYLLSEDTSGKFSVDKLKFDKLYKMLTEIYTEDNFVNFFKVINRKTYLNFDKAVFRINIVPDENYTIKDGFNLKGANLSTNFNGQNTEINSRNFTRLKNFTGLFEFYKLLCVRGIIPFKTKSLDEGYNKALNDLCIKVNNWDLFFSPSEDNFTNDLDKVEEITADTNIEAAEENISLDLIQQYYLTFDFDNEPENISIENLSSDIIGQLEPMPNIERFPNGKKYELDKYTMFHYLRAQEFEHGDSRIILTNSAEEALLKPNVAYTFFSSKYVKKINKAVEAFMFLNWAEELVYDFTDETNEVTTMDKIADITIIVPYIGPALNIGNMLSKGEFVEAIIFTGVVAMLEFIPEYALPVFGTFAIVSYIANKVLTVQTINNALSKRNEKWDEVYKYTVTNWLAKVNTQIDLIREKMKKALENQAEATKAIINYQYNQYTEEEKNNINFNIDDLSSKLNESINSAMININKFLDQCSVSYLMNSMIPYAVKRLKDFDASVRDVLLKYIYDNRGTLVLQVDRLKDEVNNTLSADIPFQLSKYVDNKKLLSTFTEYIKNIVNTSILSIVYKKDDLIDLSRYGAKINIGDRVYYDSIDKNQIKLINLESSTIEVILKNAIVYNSMYENFSTSFWIKIPKYFSKINLNNEYTIINCIENNSGWKVSLNYGEIIWTLQDNKQNIQRVVFKYSQMVNISDYINRWIFVTITNNRLTKSKIYINGRLIDQKPISNLGNIHASNKIMFKLDGCRDPRRYIMIKYFNLFDKELNEKEIKDLYDSQSNSGILKDFWGNYLQYDKPYYMLNLYDPNKYVDVNNIGIRGYMYLKGPRGSVVTTNIYLNSTLYEGTKFIIKKYASGNEDNIVRNNDRVYINVVVKNKEYRLATNASQAGVEKILSALEIPDVGNLSQVVVMKSKDDQGIRNKCKMNLQDNNGNDIGFIGFHLYDNIAKLVASNWYNRQVGKASRTFGCSWEFIPVDDGWGESSL

SEQ ID NO: 43 - protein, 1296 aa, Artificial Sequence
  Synthetic
MPFVNKQFNYKDPVNGVDIAYIKIPNAGQMQPVKAFKIHNKIWVIPERDTFTNPEEGDLNPPPEAKQVPVSYYDSTYLSTDNEKDNYLKGVTKLFERIYSTDLGRMLLTSIVRGIPFWGGSTIDTELKVIDTNCINVIQPDGSYRSEELNLVIIGPSADIIQFECKSFGHDVLNLTRNGYGSTQYIRFSPDFTFGFEESLEVDTNPLLGAGKFATDPAVTLAHELIHAEHRLYGIAINPNRVFKVNTNAYYEMSGLEVSFEELRTFGGHDAKFIDSLQENEFRLYYYNKFKDVASTLNKAKSIIGTTASLQYMKNVFKEKYLLSEDTSGKFSVDKLKFDKLYKMLTEIYTEDNFVNFFKVINRKTYLNFDKAVFRINIVPDENYTIKDGFNLKGANLSTNFNGQNTEINSRNFTRLKNFTGLFEFYKLLCVRGIIPFKTKSLDEGYNKALNDLCIKVNNWDLFFSPSEDNFTNDLDKVEEITADTNIEAAEENISLDLIQQYYLTFDFDNEPENISIENLSSDIIGQLEPMPNIERFPNGKKYELDKYTMFHYLRAQEFEHGDSRIILTNSAEEALLKPNVAYTFFSSKYVKKINKAVEAFMFLNWAEELVYDFTDETNEVTTMDKIADITIIVPYIGPALNIGNMLSKGEFVEAIIFTGVVAMLEFIPEYALPVFGTFAIVSYIANKVLTVQTINNALSKRNEKWDEVYKYTVTNWLAKVNTQIDLIREKMKKALENQAEATKAIINYQYNQYTEEEKNNINFNIDDLSSKLNESINSAMININKFLDQCSVSYLMNSMIPYAVKRLKDFDASVRDVLLKYIYDNRGTLVLQVDRLKDEVNNTLSADIPFQLSKYVDNKKLLSTFTEYIKNIVNTSILSIVYKKDDLIDLSRYGAKINIGDRVYYDSIDKNQIKLINLESSTIEVILKNAIVYNSMYENFSTSFWIKIPKYFSKINLNNEYTIINCIENNSGWKVSLNYGEIIWTLQDNKQNIQRVVFKYSQMVNISDYINRWIFVTITNNRLTKSKIYINGRLIDQKPISNLGNIHASNKIMFKLDGCRDPRRYIMIKYFNLFDKELNEKEIKDLYDSQSNSGILKDFWGNYLQYDKPYYMLNLFDPNKYVDVNNIGIRGYMYLKGPRGSVVTTNIYLNSTLYMGTKFIIKKYASGNEDNIVRNNDRVYINVVVKNKEYRLATNASQAGVEKILSALEIPDVGNLSQVVVMKSKDDQGIRNKCKMNLQDNNGNDIGFIGFHLYDNIAKLVASNWYNRQVGKASRTFGCSWEFIPVDDGWGESSL

SEQ ID NO: 44 - protein, 1296 aa, Artificial Sequence
  Synthetic
MPFVNKQFNYKDPVNGVDIAYIKIPNAGQMQPVKAFKIHNKIWVIPERDTFTNPEEGDLNPPPEAKQVPVSYYDSTYLSTDNEKDNYLKGVTKLFERIYSTDLGRMLLTSIVRGIPFWGGSTIDTELKVIDTNCINVIQPDGSYRSEELNLVIIGPSADIIQFECKSFGHDVLNLTRNGYGSTQYIRFSPDFTFGFEESLEVDTNPLLGAGKFATDPAVTLAHELIHAEHRLYGIAINPNRVFKVNTNAYYEMSGLEVSFEELRTFGGHDAKFIDSLQENEFRLYYYNKFKDVASTLNKAKSIIGTTASLQYMKNVFKEKYLLSEDTSGKFSVDKLKFDKLYKMLTEIYTEDNFVNFFKVINRKTYLNFDKAVFRINIVPDENYTIKDGFNLKGANLSTNFNGQNTEINSRNFTRLKNFTGLFEFYKLLCVRGIIPFKTKSLDEGYNKALNDLCIKVNNWDLFFSPSEDNFTNDLDKVEEITADTNIEAAEENISLDLIQQYYLTFDFDNEPENISIENLSSDIIGQLEPMPNIERFPNGKKYELDKYTMFHYLRAQEFEHGDSRIILTNSAEEALLKPNVAYTFFSSKYVKKINKAVEAFMFLNWAEELVYDFTDETNEVTTMDKIADITIIVPYIGPALNIGNMLSKGEFVEAIIFTGVVAMLEFIPEYALPVFGTFAIVSYIANKVLTVQTINNALSKRNEKWDEVYKYTVTNWLAKVNTQIDLIREKMKKALENQAEATKAIINYQYNQYTEEEKNNINFNIDDLSSKLNESINSAMININKFLDQCSVSYLMNSMIPYAVKRLKDFDASVRDVLLKYIYDNRGTLVLQVDRLKDEVNNTLSADIPFQLSKYVDNKKLLSTFTEYIKNIVNTSILSIVYKKDDLIDLSRYGAKINIGDRVYYDSIDKNQIKLINLESSTIEVILKNAIVYNSMYENFSTSFWIKIPKYFSKINLNNEYTIINCIENNSGWKVSLNYGEIIWTLQDNKQNIQRVVFKYSQMVNISDYINRWIFVTITNNRLTKSKIYINGRLIDQKPISNLGNIHASNKIMFKLDGCRDPRRYIMIKYFNLFDKELNEKEIKDLYDSQSNSGILKDFWGNYLQYDKPYYMLNLFDPNKYVDVNNIGIRGYMYLKGPRGSVVTTNIYLNSTLYEGTKFIIKKYASGNKDNIVRNNDRVYINVVVKNKEYRLATNASQAGVEKILSALEIPDVGNLSQVVVMKSKDDQGIRNKCKMNLQDNNGNDIGFIGFHLYDNIAKLVASNWYNRQVGKASRTFGCSWEFIPVDDGWGESSL

SEQ ID NO: 45 - protein, 1296 aa, Artificial Sequence
  Synthetic
MPFVNKQFNYKDPVNGVDIAYIKIPNAGQMQPVKAFKIHNKIWVIPERDTFTNPEEGDLNPPPEAKQVPVSYYDSTYLSTDNEKDNYLKGVTKLFERIYSTDLGRMLLTSIVRGIPFWGGSTIDTELKVIDTNCINVIQPDGSYRSEELNLVIIGPSADIIQFECKSFGHDVLNLTRNGYGSTQYIRFSPDFTFGFEESLEVDTNPLLGAGKFATDPAVTLAHELIHAEHRLYGIAINPNRVFKVNTNAYYEMSGLEVSFEELRTFGGHDAKFIDSLQENEFRLYYYNKFKDVASTLNKAKSIIGTTASLQYMKNVFKEKYLLSEDTSGKFSVDKLKFDKLYKMLTEIYTEDNFVNFFKVINRKTYLNFDKAVFRINIVPDENYTIKDGFNLKGANLSTNFNGQNTEINSRNFTRLKNFTGLFEFYKLLCVRGIIPFKTKSLDEGYNKALNDLCIKVNNWDLFFSPSEDNFTNDLDKVEEITADTNIEAAEENISLDLIQQYYLTFDFDNEPENISIENLSSDIIGQLEPMPNIERFPNGKKYELDKYTMFHYLRAQEFEHGDSRIILTNSAEEALLKPNVAYTFFSSKYVKKINKAVEAFMFLNWAEELVYDFTDETNEVTTMDKIADITIIVPYIGPALNIGNMLSKGEFVEAIIFTGVVAMLEFIPEYALPVFGTFAIVSYIANKVLTVQTINNALSKRNEKWDEVYKYTVTNWLAKVNTQIDLIREKMKKALENQAEATKAIINYQYNQYTEEEKNNINFNIDDLSSKLNESINSAMININKFLDQCSVSYLMNSMIPYAVKRLKDFDASVRDVLLKYIYDNRGTLVLQVDRLKDEVNNTLSADIPFQLSKYVDNKKLLSTFTEYIKNIVNTSILSIVYKKDDLIDLSRYGAKINIGDRVYYDSIDKNQIKLINLESSTIEVILKNAIVYNSMYENFSTSFWIKIPKYFSKINLNNEYTIINCIENNSGWKVSLNYGEIIWTLQDNKQNIQRVVFKYSQMVNISDYINRWIFVTITNNRLTKSKIYINGRLIDQKPISNLGNIHASNKIMFKLDGCRDPRRYIMIKYFNLFDKELNEKEIKDLYDSQSNSGILKDFWGNYLQYDKPYYMLNLFDPNKYVDVNNIGIRGYMYLKGPRGSVVTTNIYLNSTLYEGTKFIIKKYASGNEDNIVRNNDRVYINVVVKNKEYRLATNASQAGVEKILSALEIPDVGNLSQVVVMKSKNDQGIRNKCKMNLQDNNGNDIGFIGFHLYDNIAKLVASNWYNRQVGKASRTFGCSWEFIPVDDGWGESSL

SEQ ID NO: 46 - protein, 1296 aa, Artificial Sequence
  Synthetic
MPFVNKQFNYKDPVNGVDIAYIKIPNAGQMQPVKAFKIHNKIWVIPERDTFTNPEEGDLNPPPEAKQVPVSYYDSTYLSTDNEKDNYLKGVTKLFERIYSTDLGRMLLTSIVRGIPFWGGSTIDTELKVIDTNCINVIQPDGSYRSEELNLVIIGPSADIIQFECKSFGHDVLNLTRNGYGSTQYIRFSPDFTFGFEESLEVDTNPLLGAGKFATDPAVTLAHELIHAEHRLYGIAINPNRVFKVNTNAYYEMSGLEVSFEELRTFGGHDAKFIDSLQENEFRLYYYNKFKDVASTLNKAKSIIGTTASLQYMKNVFKEKYLLSEDTSGKFSVDKLKFDKLYKMLTEIYTEDNFVNFFKVINRKTYLNFDKAVFRINIVPDENYTIKDGFNLKGANLSTNFNGQNTEINSRNFTRLKNFTGLFEFYKLLCVRGIIPFKTKSLDEGYNKALNDLCIKVNNWDLFFSPSEDNFTNDLDKVEEITADTNIEAAEENISLDLIQQYYLTFDFDNEPENISIENLSSDIIGQLEPMPNIERFPNGKKYELDKYTMFHYLRAQEFEHGDSRIILTNSAEEALLKPNVAYTFFSSKYVKKINKAVEAFMFLNWAEELVYDFTDETNEVTTMDKIADITIIVPYIGPALNIGNMLSKGEFVEAIIFTGVVAMLEFIPEYALPVFGTFAIVSYIANKVLTVQTINNALSKRNEKWDEVYKYTVTNWLAKVNTQIDLIREKMKKALENQAEATKAIINYQYNQYTEEEKNNINFNIDDLSSKLNESINSAMININKFLDQCSVSYLMNSMIPYAVKRLKDFDASVRDVLLKYIYDNRGTLVLQVDRLKDEVNNTLSADIPFQLSKYVDNKKLLSTFTEYIKNIVNTSILSIVYKKDDLIDLSRYGAKINIGDRVYYDSIDKNQIKLINLESSTIEVILKNAIVYNSMYENFSTSFWIKIPKYFSKINLNNEYTIINCIENNSGWKVSLNYGEIIWTLQDNKQNIQRVVFKYSQMVNISDYINRWIFVTITNNRLTKSKIYINGRLIDQKPISNLGNIHASNKIMFKLDGCRDPRRYIMIKYFNLFDKELNEKEIKDLYDSQSNSGILKDFWGNYLQYDKPYYMLNLFDPNKYVDVNNIGIRGYMYLKGPRGSVVTTNIYLNSTLYEGTKFIIKKYASGNEDNIVRNNDRVYINVVVKNKEYRLATNASQAGVEKILSALEIPDVGNLSQVVVMKSKDDQGIRNKCKMNLQDNNGNDIGFIGFHQYDNIAKLVASNWYNRQVGKASRTFGCSWEFIPVDDGWGESSL

SEQ ID NO: 47 - protein, 1296 aa, Artificial Sequence
  Synthetic
MPFVNKQFNYKDPVNGVDIAYIKIPNAGQMQPVKAFKIHNKIWVIPERDTFTNPEEGDLNPPPEAKQVPVSYYDSTYLSTDNEKDNYLKGVTKLFERIYSTDLGRMLLTSIVRGIPFWGGSTIDTELKVIDTNCINVIQPDGSYRSEELNLVIIGPSADIIQFECKSFGHDVLNLTRNGYGSTQYIRFSPDFTFGFEESLEVDTNPLLGAGKFATDPAVTLAHELIHAEHRLYGIAINPNRVFKVNTNAYYEMSGLEVSFEELRTFGGHDAKFIDSLQENEFRLYYYNKFKDVASTLNKAKSIIGTTASLQYMKNVFKEKYLLSEDTSGKFSVDKLKFDKLYKMLTEIYTEDNFVNFFKVINRKTYLNFDKAVFRINIVPDENYTIKDGFNLKGANLSTNFNGQNTEINSRNFTRLKNFTGLFEFYKLLCVRGIIPFKTKSLDEGYNKALNDLCIKVNNWDLFFSPSEDNFTNDLDKVEEITADTNIEAAEENISLDLIQQYYLTFDFDNEPENISIENLSSDIIGQLEPMPNIERFPNGKKYELDKYTMFHYLRAQEFEHGDSRIILTNSAEEALLKPNVAYTFFSSKYVKKINKAVEAFMFLNWAEELVYDFTDETNEVTTMDKIADITIIVPYIGPALNIGNMLSKGEFVEAIIFTGVVAMLEFIPEYALPVFGTFAIVSYIANKVLTVQTINNALSKRNEKWDEVYKYTVTNWLAKVNTQIDLIREKMKKALENQAEATKAIINYQYNQYTEEEKNNINFNIDDLSSKLNESINSAMININKFLDQCSVSYLMNSMIPYAVKRLKDFDASVRDVLLKYIYDNRGTLVLQVDRLKDEVNNTLSADIPFQLSKYVDNKKLLSTFTEYIKNIVNTSILSIVYKKDDLIDLSRYGAKINIGDRVYYDSIDKNQIKLINLESSTIEVILKNAIVYNSMYENFSTSFWIKIPKYFSKINLNNEYTIINCIENNSGWKVSLNYGEIIWTLQDNKQNIQRVVFKYSQMVNISDYINRWIFVTITNNRLTKSKIYINGRLIDQKPISNLGNIHASNKIMFKLDGCRDPRRYIMIKYFNLFDKELNEKEIKDLYDSQSNSGILKDFWGNYLQYDKPYYMLNLFDPNKYVDVNNIGIRGYMYLKGPRGSVVTTNIYLNSTLYEGTKFIIKKYASGNEDNIVRNNDRVYINVVVKNKEYRLATNASQAGVEKILSALEIPDVGNLSQVVVMKSKDDQGIRNKCKMNLQDNNGNDIGFIGFHLFDNIAKLVASNWYNRQVGKASRTFGCSWEFIPVDDGWGESSL

SEQ ID NO: 48 - protein, 1296 aa, Artificial Sequence
  Synthetic
MPFVNKQFNYKDPVNGVDIAYIKIPNAGQMQPVKAFKIHNKIWVIPERDTFTNPEEGDLNPPPEAKQVPVSYYDSTYLSTDNEKDNYLKGVTKLFERIYSTDLGRMLLTSIVRGIPFWGGSTIDTELKVIDTNCINVIQPDGSYRSEELNLVIIGPSADIIQFECKSFGHDVLNLTRNGYGSTQYIRFSPDFTFGFEESLEVDTNPLLGAGKFATDPAVTLAHELIHAEHRLYGIAINPNRVFKVNTNAYYEMSGLEVSFEELRTFGGHDAKFIDSLQENEFRLYYYNKFKDVASTLNKAKSIIGTTASLQYMKNVFKEKYLLSEDTSGKFSVDKLKFDKLYKMLTEIYTEDNFVNFFKVINRKTYLNFDKAVFRINIVPDENYTIKDGFNLKGANLSTNFNGQNTEINSRNFTRLKNFTGLFEFYKLLCVRGIIPFKTKSLDEGYNKALNDLCIKVNNWDLFFSPSEDNFTNDLDKVEEITADTNIEAAEENISLDLIQQYYLTFDFDNEPENISIENLSSDIIGQLEPMPNIERFPNGKKYELDKYTMFHYLRAQEFEHGDSRIILTNSAEEALLKPNVAYTFFSSKYVKKINKAVEAFMFLNWAEELVYDFTDETNEVTTMDKIADITIIVPYIGPALNIGNMLSKGEFVEAIIFTGVVAMLEFIPEYALPVFGTFAIVSYIANKVLTVQTINNALSKRNEKWDEVYKYTVTNWLAKVNTQIDLIREKMKKALENQAEATKAIINYQYNQYTEEEKNNINFNIDDLSSKLNESINSAMININKFLDQCSVSYLMNSMIPYAVKRLKDFDASVRDVLLKYIYDNRGTLVLQVDRLKDEVNNTLSADIPFQLSKYVDNKKLLSTFTEYIKNIVNTSILSIVYKKDDLIDLSRYGAKINIGDRVYYDSIDKNQIKLINLESSTIEVILKNAIVYNSMYENFSTSFWIKIPKYFSKINLNNEYTIINCIENNSGWKVSLNYGEIIWTLQDNKQNIQRVVFKYSQMVNISDYINRWIFVTITNNRLTKSKIYINGRLIDQKPISNLGNIHASNKIMFKLDGCRDPRRYIMIKYFNLFDKELNEKEIKDLYDSQSNSGILKDFWGNYLQYDKPYYMLNLFDPNKYVDVNNIGIRGYMYLKGPRGSVVTTNIYLNSTLYEGTKFIIKKYASGNEDNIVRNNDRVYINVVVKNKEYRLATNASQAGVEKILSALEIPDVGNLSQVVVMKSKDDQGIRNKCKMNLQDNNGNDIGFIGFHLYNNIAKLVASNWYNRQVGKASRTFGCSWEFIPVDDGWGESSL

SEQ ID NO: 49 - protein, 424 aa, Artificial Sequence
  Synthetic
IINTSILNLRYESNHLIDLSRYASKINIGSKVNFDPIDKNQIQLFNLESSKIEVILKNAIVYNSMYENFSTSFWIRIPKYFNSISLNNEYTIINCMENNSGWKVSLNYGEIIWTLQDTQEIKQRVVFKYSQMINISDYINRWIFVTITNNRLNNSKIYINGRLIDQKPISNLGNIHASNNIMFKLDGCRDTHRYIWIKYFNLFDKELNEKEIKDLYDNQSNSGILKDFWGDYLQYDKPYYMLNLYDPNKYVDVNNVGIRGYMYLKGPRGSVMTTNIYLNSSLYRGTKFIIKKYASGNKDNIVRNNDRVYINVVVKNKEYRLATNASQAGVEKILSALEIPDVGNLSQVVVMKSKNDQGITNKCKMNLQDNNGNDIGFIGFHQFNNIAKLVASNWYNRQIERSSRTLGCSWEFIPVDDGWGERPL

SEQ ID NO: 50 - protein, 424 aa, Artificial Sequence
  Synthetic
IVNTSILSIVYKKDDLIDLSRYGAKINIGDRVYYDSIDKNQIKLINLESSTIEVILKNAIVYNSMYENFSTSFWIKIPKYFSKINLNNEYTIINCIENNSGWKVSLNYGEIIWTLQDNKQNIQRVVFKYSQMVNISDYINRWIFVTITNNRLTKSKIYINGRLIDQKPISNLGNIHASNKIMFKLDGCRDPRRYIMIKYFNLFDKELNEKEIKDLYDSQSNSGILKDFWGNYLQYDKPYYMLNLFDPNKYVDVNNIGIRGYMYLKGPRGSVVTTNIYLNSTLYEGTKFIIKKYASGNEDNIVRNNDRVYINVVVKNKEYRLATNASQAGVEKILSALEIPDVGNLSQVVVMKSKDDQGIRNKCKMNLQDNNGNDIGFIGFHLYDNIAKLVASNWYNRQVGKASRTFGCSWEFIPVDDGWGESSL

SEQ ID NO: 51 - protein, 424 aa, Artificial Sequence
  Synthetic
IINTSILNLRYESNHLIDLSRYASKINIGSKVNFDPIDKNQIQLRNLESSKIEVILKNAIVYNSMYENFSTSFWIRIPKYFNSISLNNEYTIINCMENNSGWKVSLNYGEIIWTLQDTQEIKQRVVFKYSQMINISDYINRWIFVTITNNRLNNSKIYINGRLIDQKPISNLGNIHASNNIMFKLDGCRDTHRYIWIKYFNLFDKELNEKEIKDLYDNQSNSGILKDFWGDYLQYDKPYYMLNLYDPNKYVDVNNVGIRGYMYLKGPRGSVMTTNIYLNSSLYRGTKFIIKKYASGNKDNIVRNNDRVYINVVVKNKEYRLATNASQAGVEKILSALEIPDVGNLSQVVVMKSKNDQGITNKCKMNLQDNNGNDIGFIGFHQFNNIAKLVASNWYNRQIERSSRTLGCSWEFIPVDDGWGERPL

SEQ ID NO: 52 - protein, 424 aa, Artificial Sequence
  Synthetic
IINTSILNLRYESNHLIDLSRYASKINIGSKVNFDPIDKNQIQLKNLESSKIEVILKNAIVYNSMYENFSTSFWIRIPKYFNSISLNNEYTIINCMENNSGWKVSLNYGEIIWTLQDTQEIKQRVVFKYSQMINISDYINRWIFVTITNNRLNNSKIYINGRLIDQKPISNLGNIHASNNIMFKLDGCRDTHRYIWIKYFNLFDKELNEKEIKDLYDNQSNSGILKDFWGDYLQYDKPYYMLNLYDPNKYVDVNNVGIRGYMYLKGPRGSVMTTNIYLNSSLYRGTKFIIKKYASGNKDNIVRNNDRVYINVVVKNKEYRLATNASQAGVEKILSALEIPDVGNLSQVVVMKSKNDQGITNKCKMNLQDNNGNDIGFIGFHQFNNIAKLVASNWYNRQIERSSRTLGCSWEFIPVDDGWGERPL

SEQ ID NO: 53 - protein, 424 aa, Artificial Sequence
  Synthetic
IINTSILNLRYESNHLIDLSRYASKINIGSKVNFDPIDKNQIQLFNLESSKIEVILKNAIVYNSMYENFSTSFWIRIPKYHNSISLNNEYTIINCMENNSGWKVSLNYGEIIWTLQDTQEIKQRVVFKYSQMINISDYINRWIFVTITNNRLNNSKIYINGRLIDQKPISNLGNIHASNNIMFKLDGCRDTHRYIWIKYFNLFDKELNEKEIKDLYDNQSNSGILKDFWGDYLQYDKPYYMLNLYDPNKYVDVNNVGIRGYMYLKGPRGSVMTTNIYLNSSLYRGTKFIIKKYASGNKDNIVRNNDRVYINVVVKNKEYRLATNASQAGVEKILSALEIPDVGNLSQVVVMKSKNDQGITNKCKMNLQDNNGNDIGFIGFHQFNNIAKLVASNWYNRQIERSSRTLGCSWEFIPVDDGWGERPL

SEQ ID NO: 54 - protein, 424 aa, Artificial Sequence
  Synthetic
IINTSILNLRYESNHLIDLSRYASKINIGSKVNFDPIDKNQIQLFNLESSKIEVILKNAIVYNSMYENFSTSFWIRIPKYYNSISLNNEYTIINCMENNSGWKVSLNYGEIIWTLQDTQEIKQRVVFKYSQMINISDYINRWIFVTITNNRLNNSKIYINGRLIDQKPISNLGNIHASNNIMFKLDGCRDTHRYIWIKYFNLFDKELNEKEIKDLYDNQSNSGILKDFWGDYLQYDKPYYMLNLYDPNKYVDVNNVGIRGYMYLKGPRGSVMTTNIYLNSSLYRGTKFIIKKYASGNKDNIVRNNDRVYINVVVKNKEYRLATNASQAGVEKILSALEIPDVGNLSQVVVMKSKNDQGITNKCKMNLQDNNGNDIGFIGFHQFNNIAKLVASNWYNRQIERSSRTLGCSWEFIPVDDGWGERPL

SEQ ID NO: 55 - protein, 424 aa, Artificial Sequence
  Synthetic
IINTSILNLRYESNHLIDLSRYASKINIGSKVNFDPIDKNQIQLFNLESSKIEVILKNAIVYNSMYENFSTSFWIRIPKYFSSISLNNEYTIINCMENNSGWKVSLNYGEIIWTLQDTQEIKQRVVFKYSQMINISDYINRWIFVTITNNRLNNSKIYINGRLIDQKPISNLGNIHASNNIMFKLDGCRDTHRYIWIKYFNLFDKELNEKEIKDLYDNQSNSGILKDFWGDYLQYDKPYYMLNLYDPNKYVDVNNVGIRGYMYLKGPRGSVMTTNIYLNSSLYRGTKFIIKKYASGNKDNIVRNNDRVYINVVVKNKEYRLATNASQAGVEKILSALEIPDVGNLSQVVVMKSKNDQGITNKCKMNLQDNNGNDIGFIGFHQFNNIAKLVASNWYNRQIERSSRTLGCSWEFIPVDDGWGERPL

SEQ ID NO: 56 - protein, 424 aa, Artificial Sequence
  Synthetic
IINTSILNLRYESNHLIDLSRYASKINIGSKVNFDPIDKNQIQLFNLESSKIEVILKNAIVYNSMYENFSTSFWIRIPKYFNKISLNNEYTIINCMENNSGWKVSLNYGEIIWTLQDTQEIKQRVVFKYSQMINISDYINRWIFVTITNNRLNNSKIYINGRLIDQKPISNLGNIHASNNIMFKLDGCRDTHRYIWIKYFNLFDKELNEKEIKDLYDNQSNSGILKDFWGDYLQYDKPYYMLNLYDPNKYVDVNNVGIRGYMYLKGPRGSVMTTNIYLNSSLYRGTKFIIKKYASGNKDNIVRNNDRVYINVVVKNKEYRLATNASQAGVEKILSALEIPDVGNLSQVVVMKSKNDQGITNKCKMNLQDNNGNDIGFIGFHQFNNIAKLVASNWYNRQIERSSRTLGCSWEFIPVDDGWGERPL

SEQ ID NO: 57 - protein, 424 aa, Artificial Sequence
  Synthetic
IINTSILNLRYESNHLIDLSRYASKINIGSKVNFDPIDKNQIQLFNLESSKIEVILKNAIVYNSMYENFSTSFWIRIPKYFNSINLNNEYTIINCMENNSGWKVSLNYGEIIWTLQDTQEIKQRVVFKYSQMINISDYINRWIFVTITNNRLNNSKIYINGRLIDQKPISNLGNIHASNNIMFKLDGCRDTHRYIWIKYFNLFDKELNEKEIKDLYDNQSNSGILKDFWGDYLQYDKPYYMLNLYDPNKYVDVNNVGIRGYMYLKGPRGSVMTTNIYLNSSLYRGTKFIIKKYASGNKDNIVRNNDRVYINVVVKNKEYRLATNASQAGVEKILSALEIPDVGNLSQVVVMKSKNDQGITNKCKMNLQDNNGNDIGFIGFHQFNNIAKLVASNWYNRQIERSSRTLGCSWEFIPVDDGWGERPL

SEQ ID NO: 58 - protein, 424 aa, Artificial Sequence
  Synthetic
IINTSILNLRYESNHLIDLSRYASKINIGSKVNFDPIDKNQIQLFNLESSKIEVILKNAIVYNSMYENFSTSFWIRIPKYFNSISLNNEYTIINCIENNSGWKVSLNYGEIIWTLQDTQEIKQRVVFKYSQMINISDYINRWIFVTITNNRLNNSKIYINGRLIDQKPISNLGNIHASNNIMFKLDGCRDTHRYIWIKYFNLFDKELNEKEIKDLYDNQSNSGILKDFWGDYLQYDKPYYMLNLYDPNKYVDVNNVGIRGYMYLKGPRGSVMTTNIYLNSSLYRGTKFIIKKYASGNKDNIVRNNDRVYINVVVKNKEYRLATNASQAGVEKILSALEIPDVGNLSQVVVMKSKNDQGITNKCKMNLQDNNGNDIGFIGFHQFNNIAKLVASNWYNRQIERSSRTLGCSWEFIPVDDGWGERPL

SEQ ID NO: 59 - protein, 424 aa, Artificial Sequence
  Synthetic
IINTSILNLRYESNHLIDLSRYASKINIGSKVNFDPIDKNQIQLFNLESSKIEVILKNAIVYNSMYENFSTSFWIRIPKYFNSISLNNEYTIINCMENNSGWKVSLNYGEIIWTLQDTQEIKQRVVFKYSQMINISDYINRWIFVTITNNRLTNSKIYINGRLIDQKPISNLGNIHASNNIMFKLDGCRDTHRYIWIKYFNLFDKELNEKEIKDLYDNQSNSGILKDFWGDYLQYDKPYYMLNLYDPNKYVDVNNVGIRGYMYLKGPRGSVMTTNIYLNSSLYRGTKFIIKKYASGNKDNIVRNNDRVYINVVVKNKEYRLATNASQAGVEKILSALEIPDVGNLSQVVVMKSKNDQGITNKCKMNLQDNNGNDIGFIGFHQFNNIAKLVASNWYNRQIERSSRTLGCSWEFIPVDDGWGERPL

SEQ ID NO: 60 - protein, 424 aa, Artificial Sequence
  Synthetic
IINTSILNLRYESNHLIDLSRYASKINIGSKVNFDPIDKNQIQLFNLESSKIEVILKNAIVYNSMYENFSTSFWIRIPKYFNSISLNNEYTIINCMENNSGWKVSLNYGEIIWTLQDTQEIKQRVVFKYSQMINISDYINRWIFVTITNNRLNKSKIYINGRLIDQKPISNLGNIHASNNIMFKLDGCRDTHRYIWIKYFNLFDKELNEKEIKDLYDNQSNSGILKDFWGDYLQYDKPYYMLNLYDPNKYVDVNNVGIRGYMYLKGPRGSVMTTNIYLNSSLYRGTKFIIKKYASGNKDNIVRNNDRVYINVVVKNKEYRLATNASQAGVEKILSALEIPDVGNLSQVVVMKSKNDQGITNKCKMNLQDNNGNDIGFIGFHQFNNIAKLVASNWYNRQIERSSRTLGCSWEFIPVDDGWGERPL

SEQ ID NO: 61 - protein, 424 aa, Artificial Sequence
  Synthetic
IINTSILNLRYESNHLIDLSRYASKINIGSKVNFDPIDKNQIQLFNLESSKIEVILKNAIVYNSMYENFSTSFWIRIPKYFNSISLNNEYTIINCMENNSGWKVSLNYGEIIWTLQDTQEIKQRVVFKYSQMINISDYINRWIFVTITNNRLNNSKIYINGRLIDQKPISNLGNIHASNKIMFKLDGCRDTHRYIWIKYFNLFDKELNEKEIKDLYDNQSNSGILKDFWGDYLQYDKPYYMLNLYDPNKYVDVNNVGIRGYMYLKGPRGSVMTTNIYLNSSLYRGTKFIIKKYASGNKDNIVRNNDRVYINVVVKNKEYRLATNASQAGVEKILSALEIPDVGNLSQVVVMKSKNDQGITNKCKMNLQDNNGNDIGFIGFHQFNNIAKLVASNWYNRQIERSSRTLGCSWEFIPVDDGWGERPL

SEQ ID NO: 62 - protein, 424 aa, Artificial Sequence
  Synthetic
IINTSILNLRYESNHLIDLSRYASKINIGSKVNFDPIDKNQIQLFNLESSKIEVILKNAIVYNSMYENFSTSFWIRIPKYFNSISLNNEYTIINCMENNSGWKVSLNYGEIIWTLQDTQEIKQRVVFKYSQMINISDYINRWIFVTITNNRLNNSKIYINGRLIDQKPISNLGNIHASNNIMFKLDGCRETHRYIWIKYFNLFDKELNEKEIKDLYDNQSNSGILKDFWGDYLQYDKPYYMLNLYDPNKYVDVNNVGIRGYMYLKGPRGSVMTTNIYLNSSLYRGTKFIIKKYASGNKDNIVRNNDRVYINVVVKNKEYRLATNASQAGVEKILSALEIPDVGNLSQVVVMKSKNDQGITNKCKMNLQDNNGNDIGFIGFHQFNNIAKLVASNWYNRQIERSSRTLGCSWEFIPVDDGWGERPL

SEQ ID NO: 63 - protein, 424 aa, Artificial Sequence
  Synthetic
IINTSILNLRYESNHLIDLSRYASKINIGSKVNFDPIDKNQIQLFNLESSKIEVILKNAIVYNSMYENFSTSFWIRIPKYFNSISLNNEYTIINCMENNSGWKVSLNYGEIIWTLQDTQEIKQRVVFKYSQMINISDYINRWIFVTITNNRLNNSKIYINGRLIDQKPISNLGNIHASNNIMFKLDGCRDPHRYIWIKYFNLFDKELNEKEIKDLYDNQSNSGILKDFWGDYLQYDKPYYMLNLYDPNKYVDVNNVGIRGYMYLKGPRGSVMTTNIYLNSSLYRGTKFIIKKYASGNKDNIVRNNDRVYINVVVKNKEYRLATNASQAGVEKILSALEIPDVGNLSQVVVMKSKNDQGITNKCKMNLQDNNGNDIGFIGFHQFNNIAKLVASNWYNRQIERSSRTLGCSWEFIPVDDGWGERPL

SEQ ID NO: 64 - protein, 424 aa, Artificial Sequence
  Synthetic
IINTSILNLRYESNHLIDLSRYASKINIGSKVNFDPIDKNQIQLFNLESSKIEVILKNAIVYNSMYENFSTSFWIRIPKYFNSISLNNEYTIINCMENNSGWKVSLNYGEIIWTLQDTQEIKQRVVFKYSQMINISDYINRWIFVTITNNRLNNSKIYINGRLIDQKPISNLGNIHASNNIMFKLDGCRDTRRYIWIKYFNLFDKELNEKEIKDLYDNQSNSGILKDFWGDYLQYDKPYYMLNLYDPNKYVDVNNVGIRGYMYLKGPRGSVMTTNIYLNSSLYRGTKFIIKKYASGNKDNIVRNNDRVYINVVVKNKEYRLATNASQAGVEKILSALEIPDVGNLSQVVVMKSKNDQGITNKCKMNLQDNNGNDIGFIGFHQFNNIAKLVASNWYNRQIERSSRTLGCSWEFIPVDDGWGERPL

SEQ ID NO: 65 - protein, 424 aa, Artificial Sequence
  Synthetic
IINTSILNLRYESNHLIDLSRYASKINIGSKVNFDPIDKNQIQLFNLESSKIEVILKNAIVYNSMYENFSTSFWIRIPKYFNSISLNNEYTIINCMENNSGWKVSLNYGEIIWTLQDTQEIKQRVVFKYSQMINISDYINRWIFVTITNNRLNNSKIYINGRLIDQKPISNLGNIHASNNIMFKLDGCRDTQRYIWIKYFNLFDKELNEKEIKDLYDNQSNSGILKDFWGDYLQYDKPYYMLNLYDPNKYVDVNNVGIRGYMYLKGPRGSVMTTNIYLNSSLYRGTKFIIKKYASGNKDNIVRNNDRVYINVVVKNKEYRLATNASQAGVEKILSALEIPDVGNLSQVVVMKSKNDQGITNKCKMNLQDNNGNDIGFIGFHQFNNIAKLVASNWYNRQIERSSRTLGCSWEFIPVDDGWGERPL

SEQ ID NO: 66 - protein, 424 aa, Artificial Sequence
  Synthetic
IINTSILNLRYESNHLIDLSRYASKINIGSKVNFDPIDKNQIQLFNLESSKIEVILKNAIVYNSMYENFSTSFWIRIPKYFNSISLNNEYTIINCMENNSGWKVSLNYGEIIWTLQDTQEIKQRVVFKYSQMINISDYINRWIFVTITNNRLNNSKIYINGRLIDQKPISNLGNIHASNNIMFKLDGCRDTHNYIWIKYFNLFDKELNEKEIKDLYDNQSNSGILKDFWGDYLQYDKPYYMLNLYDPNKYVDVNNVGIRGYMYLKGPRGSVMTTNIYLNSSLYRGTKFIIKKYASGNKDNIVRNNDRVYINVVVKNKEYRLATNASQAGVEKILSALEIPDVGNLSQVVVMKSKNDQGITNKCKMNLQDNNGNDIGFIGFHQFNNIAKLVASNWYNRQIERSSRTLGCSWEFIPVDDGWGERPL

SEQ ID NO: 67 - protein, 424 aa, Artificial Sequence
  Synthetic
IINTSILNLRYESNHLIDLSRYASKINIGSKVNFDPIDKNQIQLFNLESSKIEVILKNAIVYNSMYENFSTSFWIRIPKYFNSISLNNEYTIINCMENNSGWKVSLNYGEIIWTLQDTQEIKQRVVFKYSQMINISDYINRWIFVTITNNRLNNSKIYINGRLIDQKPISNLGNIHASNNIMFKLDGCRDTHRRIWIKYFNLFDKELNEKEIKDLYDNQSNSGILKDFWGDYLQYDKPYYMLNLYDPNKYVDVNNVGIRGYMYLKGPRGSVMTTNIYLNSSLYRGTKFIIKKYASGNKDNIVRNNDRVYINVVVKNKEYRLATNASQAGVEKILSALEIPDVGNLSQVVVMKSKNDQGITNKCKMNLQDNNGNDIGFIGFHQFNNIAKLVASNWYNRQIERSSRTLGCSWEFIPVDDGWGERPL

SEQ ID NO: 68 - protein, 424 aa, Artificial Sequence
  Synthetic
IINTSILNLRYESNHLIDLSRYASKINIGSKVNFDPIDKNQIQLFNLESSKIEVILKNAIVYNSMYENFSTSFWIRIPKYFNSISLNNEYTIINCMENNSGWKVSLNYGEIIWTLQDTQEIKQRVVFKYSQMINISDYINRWIFVTITNNRLNNSKIYINGRLIDQKPISNLGNIHASNNIMFKLDGCRDTHRKIWIKYFNLFDKELNEKEIKDLYDNQSNSGILKDFWGDYLQYDKPYYMLNLYDPNKYVDVNNVGIRGYMYLKGPRGSVMTTNIYLNSSLYRGTKFIIKKYASGNKDNIVRNNDRVYINVVVKNKEYRLATNASQAGVEKILSALEIPDVGNLSQVVVMKSKNDQGITNKCKMNLQDNNGNDIGFIGFHQFNNIAKLVASNWYNRQIERSSRTLGCSWEFIPVDDGWGERPL

SEQ ID NO: 69 - protein, 424 aa, Artificial Sequence
  Synthetic
IINTSILNLRYESNHLIDLSRYASKINIGSKVNFDPIDKNQIQLFNLESSKIEVILKNAIVYNSMYENFSTSFWIRIPKYFNSISLNNEYTIINCMENNSGWKVSLNYGEIIWTLQDTQEIKQRVVFKYSQMINISDYINRWIFVTITNNRLNNSKIYINGRLIDQKPISNLGNIHASNNIMFKLDGCRDTHRYIWIKYFNLFDKELNEKEIKDLYDNQSNSGILKDFWGDYLQYDKPYYMLNLYDPNKYVDVNNVGIRGYMYLKGPRGSVMYTNIYLNSSLYRGTKFIIKKYASGNKDNIVRNNDRVYINVVVKNKEYRLATNASQAGVEKILSALEIPDVGNLSQVVVMKSKNDQGITNKCKMNLQDNNGNDIGFIGFHQFNNIAKLVASNWYNRQIERSSRTLGCSWEFIPVDDGWGERPL

SEQ ID NO: 70 - protein, 424 aa, Artificial Sequence
  Synthetic
IINTSILNLRYESNHLIDLSRYASKINIGSKVNFDPIDKNQIQLFNLESSKIEVILKNAIVYNSMYENFSTSFWIRIPKYFNSISLNNEYTIINCMENNSGWKVSLNYGEIIWTLQDTQEIKQRVVFKYSQMINISDYINRWIFVTITNNRLNNSKIYINGRLIDQKPISNLGNIHASNNIMFKLDGCRDTHRYIWIKYFNLFDKELNEKEIKDLYDNQSNSGILKDFWGDYLQYDKPYYMLNLYDPNKYVDVNNVGIRGYMYLKGPRGSVMTTNIYLNSSLYMGTKFIIKKYASGNKDNIVRNNDRVYINVVVKNKEYRLATNASQAGVEKILSALEIPDVGNLSQVVVMKSKNDQGITNKCKMNLQDNNGNDIGFIGFHQFNNIAKLVASNWYNRQIERSSRTLGCSWEFIPVDDGWGERPL

SEQ ID NO: 71 - protein, 424 aa, Artificial Sequence
  Synthetic
IINTSILNLRYESNHLIDLSRYASKINIGSKVNFDPIDKNQIQLFNLESSKIEVILKNAIVYNSMYENFSTSFWIRIPKYFNSISLNNEYTIINCMENNSGWKVSLNYGEIIWTLQDTQEIKQRVVFKYSQMINISDYINRWIFVTITNNRLNNSKIYINGRLIDQKPISNLGNIHASNNIMFKLDGCRDTHRYIWIKYFNLFDKELNEKEIKDLYDNQSNSGILKDFWGDYLQYDKPYYMLNLYDPNKYVDVNNVGIRGYMYLKGPRGSVMTTNIYLNSSLYIGTKFIIKKYASGNKDNIVRNNDRVYINVVVKNKEYRLATNASQAGVEKILSALEIPDVGNLSQVVVMKSKNDQGITNKCKMNLQDNNGNDIGFIGFHQFNNIAKLVASNWYNRQIERSSRTLGCSWEFIPVDDGWGERPL

SEQ ID NO: 72 - protein, 424 aa, Artificial Sequence
  Synthetic
IINTSILNLRYESNHLIDLSRYASKINIGSKVNFDPIDKNQIQLFNLESSKIEVILKNAIVYNSMYENFSTSFWIRIPKYFNSISLNNEYTIINCMENNSGWKVSLNYGEIIWTLQDTQEIKQRVVFKYSQMINISDYINRWIFVTITNNRLNNSKIYINGRLIDQKPISNLGNIHASNNIMFKLDGCRDTHRYIWIKYFNLFDKELNEKEIKDLYDNQSNSGILKDFWGDYLQYDKPYYMLNLYDPNKYVDVNNVGIRGYMYLKGPRGSVMTTNIYLNSSLYRGTKFIIKKYASGNKDNIVRNNDRVYINVVVKNKEYRLATNASQAGVEKILSALEIPDVGNLSQVVVMKSKNDQGIRNKCKMNLQDNNGNDIGFIGFHQFNNIAKLVASNWYNRQIERSSRTLGCSWEFIPVDDGWGERPL

SEQ ID NO: 73 - protein, 424 aa, Artificial Sequence
  Synthetic
IINTSILNLRYESNHLIDLSRYASKINIGSKVNFDPIDKNQIQLFNLESSKIEVILKNAIVYNSMYENFSTSFWIRIPKYFNSISLNNEYTIINCMENNSGWKVSLNYGEIIWTLQDTQEIKQRVVFKYSQMINISDYINRWIFVTITNNRLNNSKIYINGRLIDQKPISNLGNIHASNNIMFKLDGCRDTHRYIWIKYFNLFDKELNEKEIKDLYDNQSNSGILKDFWGDYLQYDKPYYMLNLYDPNKYVDVNNVGIRGYMYLKGPRGSVMTTNIYLNSSLYRGTKFIIKKYASGNKDNIVRNNDRVYINVVVKNKEYRLATNASQAGVEKILSALEIPDVGNLSQVVVMKSKNDQGIKNKCKMNLQDNNGNDIGFIGFHQFNNIAKLVASNWYNRQIERSSRTLGCSWEFIPVDDGWGERPL

SEQ ID NO: 74 - protein, 424 aa, Artificial Sequence
  Synthetic
IINTSILNLRYESNHLIDLSRYASKINIGSKVNFDPIDKNQIQLFNLESSKIEVILKNAIVYNSMYENFSTSFWIRIPKYFNSISLNNEYTIINCMENNSGWKVSLNYGEIIWTLQDTQEIKQRVVFKYSQMINISDYINRWIFVTITNNRLNNSKIYINGRLIDQKPISNLGNIHASNNIMFKLDGCRDTHRYIWIKYFNLFDKELNEKEIKDLYDNQSNSGILKDFWGDYLQYDKPYYMLNLYDPNKYVDVNNVGIRGYMYLKGPRGSVMTTNIYLNSSLYRGTKFIIKKYASGNKDNIVRNNDRVYINVVVKNKEYRLATNASQAGVEKILSALEIPDVGNLSQVVVMKSKNDQGITNKCKMNLQDNNGNDIGFIGFHQFNNIAKLVASNWYNRQIGRSSRTLGCSWEFIPVDDGWGERPL

SEQ ID NO: 75 - protein, 424 aa, Artificial Sequence
  Synthetic
IINTSILNLRYESNHLIDLSRYASKINIGSKVNFDPIDKNQIQLFNLESSKIEVILKNAIVYNSMYENFSTSFWIRIPKYFNSISLNNEYTIINCMENNSGWKVSLNYGEIIWTLQDTQEIKQRVVFKYSQMINISDYINRWIFVTITNNRLNNSKIYINGRLIDQKPISNLGNIHASNNIMFKLDGCRDTHRYIWIKYFNLFDKELNEKEIKDLYDNQSNSGILKDFWGDYLQYDKPYYMLNLYDPNKYVDVNNVGIRGYMYLKGPRGSVMTTNIYLNSSLYRGTKFIIKKYASGNKDNIVRNNDRVYINVVVKNKEYRLATNASQAGVEKILSALEIPDVGNLSQVVVMKSKNDQGITNKCKMNLQDNNGNDIGFIGFHQFNNIAKLVASNWYNRQIERSSRTFGCSWEFIPVDDGWGERPL

SEQ ID NO: 76 - protein, 424 aa, Artificial Sequence
  Synthetic
IINTSILNLRYESNHLIDLSRYASKINIGSKVNFDPIDKNQIQLFNLESSKIEVILKNAIVYNSMYENFSTSFWIRIPKYFNSISLNNEYTIINCMENNSGWKVSLNYGEIIWTLQDTQEIKQRVVFKYSQMINISDYINRWIFVTITNNRLNNSKIYINGRLIDQKPISNLGNIHASNNIMFKLDGCRDTHRYIWIKYFNLFDKELNEKEIKDLYDNQSNSGILKDFWGDYLQYDKPYYMLNLYDPNKYVDVNNVGIRGYMYLKGPRGSVMTTNIYLNSSLYRGTKFIIKKYASGNKDNIVRNNDRVYINVVVKNKEYRLATNASQAGVEKILSALEIPDVGNLSQVVVMKSKNDQGITNKCKMNLQDNNGNDIGFIGFHQFNNIAKLVASNWYNRQIERSSRTYGCSWEFIPVDDGWGERPL

SEQ ID NO: 77 - protein, 424 aa, Artificial Sequence
  Synthetic
IINTSILNLRYESNHLIDLSRYASKINIGSKVNFDPIDKNQIQLFNLESSKIEVILKNAIVYNSMYENFSTSFWIRIPKYFNSISLNNEYTIINCMENNSGWKVSLNYGEIIWTLQDTQEIKQRVVFKYSQMINISDYINRWIFVTITNNRLNNSKIYINGRLIDQKPISNLGNIHASNNIMFKLDGCRDTHRYIWIKYFNLFDKELNEKEIKDLYDNQSNSGILKDFWGDYLQYDKPYYMLNLYDPNKYVDVNNVGIRGYMYLKGPRGSVMTTNIYLNSSLYRGTKFIIKKYASGNKDNIVRNNDRVYINVVVKNKEYRLATNASQAGVEKILSALEIPDVGNLSQVVVMKSKNDQGITNKCKMNLQDNNGNDIGFIGFHQFNNIAKLVASNWYNRQIERSSRTWGCSWEFIPVDDGWGERPL

SEQ ID NO: 78 - protein, 424 aa, Artificial Sequence
  Synthetic
IINTSILNLRYESNHLIDLSRYASKINIGSKVNFDPIDKNQIQLFNLESSKIEVILKNAIVYNSMYENFSTSFWIRIPKYFNSISLNNEYTIINCMENNSGWKVSLNYGEIIWTLQDTQEIKQRVVFKYSQMINISDYINRWIFVTITNNRLNNSKIYINGRLIDQKPISNLGNIHASNNIMFKLDGCRDTHRYIWIKYFNLFDKELNEKEIKDLYDNQSNSGILKDFWGDYLQYDKPYYMLNLYDPNKYVDVNNVGIRGYMYLKGPRGSVMTTNIYLNSSLYRGTKFIIKKYASGNKDNIVRNNDRVYINVVVKNKEYRLATNASQAGVEKILSALEIPDVGNLSQVVVMKSKNDQGITNKCKMNLQDNNGNDIGFIGFHQFNNIAKLVASNWYNRQIERSSRTLGCSWEFIPVEDGWGERPL

SEQ ID NO: 79 - protein, 424 aa, Artificial Sequence
  Synthetic
IINTSILNLRYESNHLIDLSRYASKINIGSKVNFDPIDKNQIQLFNLESSKIEVILKNAIVYNSMYENFSTSFWIRIPKYFNSISLNNEYTIINCMENNSGWKVSLNYGEIIWTLQDTQEIKQRVVFKYSQMINISDYINRWIFVTITNNRLNNSKIYINGRLIDQKPISNLGNIHASNNIMFKLDGCRDTHRYIWIKYFNLFDKELNEKEIKDLYDNQSNSGILKDFWGDYLQYDKPYYMLNLYDPNKYVDVNNVGIRGYMYLKGPRGSVMTTNIYLNSSLYRGTKFIIKKYASGNKDNIVRNNDRVYINVVVKNKEYRLATNASQAGVEKILSALEIPDVGNLSQVVVMKSKNDQGITNKCKMNLQDNNGNDIGFIGFHQFNNIAKLVASNWYNRQIERSSRTLGCSWEFIPVDYGWGERPL

SEQ ID NO: 80 - protein, 424 aa, Artificial Sequence
  Synthetic
IINTSILNLRYESNHLIDLSRYASKINIGSKVNFDPIDKNQIQLFNLESSKIEVILKNAIVYNSMYENFSTSFWIRIPKYFNSISLNNEYTIINCMENNSGWKVSLNYGEIIWTLQDTQEIKQRVVFKYSQMINISDYINRWIFVTITNNRLNNSKIYINGRLIDQKPISNLGNIHASNNIMFKLDGCRDTHRYIWIKYFNLFDKELNEKEIKDLYDNQSNSGILKDFWGDYLQYDKPYYMLNLYDPNKYVDVNNVGIRGYMYLKGPRGSVMTTNIYLNSSLYRGTKFIIKKYASGNKDNIVRNNDRVYINVVVKNKEYRLATNASQAGVEKILSALEIPDVGNLSQVVVMKSKNDQGITNKCKMNLQDNNGNDIGFIGFHQFNNIAKLVASNWYNRQIERSSRTLGCSWEFIPVDDGWRERPL

SEQ ID NO: 81 - protein, 424 aa, Artificial Sequence
  Synthetic
IINTSILNLRYESNHLIDLSRYASKINIGSKVNFDPIDKNQIQLFNLESSKIEVILKNAIVYNSMYENFSTSFWIRIPKYFNSISLNNEYTIINCMENNSGWKVSLNYGEIIWTLQDTQEIKQRVVFKYSQMINISDYINRWIFVTITNNRLNNSKIYINGRLIDQKPISNLGNIHASNNIMFKLDGCRDTHRYIWIKYFNLFDKELNEKEIKDLYDNQSNSGILKDFWGDYLQYDKPYYMLNLYDPNKYVDVNNVGIRGYMYLKGPRGSVMTTNIYLNSSLYRGTKFIIKKYASGNKDNIVRNNDRVYINVVVKNKEYRLATNASQAGVEKILSALEIPDVGNLSQVVVMKSKNDQGITNKCKMNLQDNNGNDIGFIGFHQFNNIAKLVASNWYNRQIERSSRTLGCSWEFIPVDDGWKERPL

SEQ ID NO: 82 - protein, 424 aa, Artificial Sequence
  Synthetic
IINTSILNLRYESNHLIDLSRYASKINIGSKVNFDPIDKNQIQLFNLESSKIEVILKNAIVYNSMYENFSTSFWIRIPKYFNSISLNNEYTIINCMENNSGWKVSLNYGEIIWTLQDTQEIKQRVVFKYSQMINISDYINRWIFVTITNNRLNNSKIYINGRLIDQKPISNLGNIHASNNIMFKLDGCRDTHRYIWIKYFNLFDKELNEKEIKDLYDNQSNSGILKDFWGDYLQYDKPYYMLNLYDPNKYVDVNNVGIRGYMYLKGPRGSVMTTNIYLNSSLYRGTKFIIKKYASGNKDNIVRNNDRVYINVVVKNKEYRLATNASQAGVEKILSALEIPDVGNLSQVVVMKSKNDQGITNKCKMNLQDNNGNDIGFIGFHQFNNIAKLVASNWYNRQIERSSRTLGCSWEFIPVDDGWGESPL

SEQ ID NO: 83 - protein, 424 aa, Artificial Sequence
  Synthetic
IINTSILNLRYESNHLIDLSRYASKINIGSKVNFDPIDKNQIQLFNLESSKIEVILKNAIVYNSMYENFSTSFWIRIPKYFNSISLNNEYTIINCMENNSGWKVSLNYGEIIWTLQDTQEIKQRVVFKYSQMINISDYINRWIFVTITNNRLNNSKIYINGRLIDQKPISNLGNIHASNNIMFKLDGCRDTHRYIWIKYFNLFDKELNEKEIKDLYDNQSNSGILKDFWGDYLQYDKPYYMLNLYDPNKYVDVNNVGIRGYMYLKGPRGSVMTTNIYLNSSLYRGTKFIIKKYASGNKDNIVRNNDRVYINVVVKNKEYRLATNASQAGVEKILSALEIPDVGNLSQVVVMKSKNDQGITNKCKMNLQDNNGNDIGFIGFHQFNNIAKLVASNWYNRQIERSSRTLGCSWEFIPVDDGWGETPL

SEQ ID NO: 84 - protein, 424 aa, Artificial Sequence
  Synthetic
IINTSILNLRYESNHLIDLSRYASKINIGSKVNFDPIDKNQIQLFNLESSKIEVILKNAIVYNSMYENFSTSFWIRIPKYFNSISLNNEYTIINCMENNSGWKVSLNYGEIIWTLQDTQEIKQRVVFKYSQMINISDYINRWIFVTITNNRLNNSKIYINGRLIDQKPISNLGNIHASNNIMFKLDGCRDTHRYIWIKYFNLFDKELNEKEIKDLYDNQSNSGILKDFWGDYLQYDKPYYMLNLYDPNKYVDVNNVGIRGYMYLKGPRGSVMTTNIYLNSSLYRGTKFIIKKYASGNKDNIVRNNDRVYINVVVKNKEYRLATNASQAGVEKILSALEIPDVGNLSQVVVMKSKNDQGITNKCKMNLQDNNGNDIGFIGFHQFNNIAKLVASNWYNRQIERSSRTLGCSWEFIPVDDGWGERSL

SEQ ID NO: 85 - protein, 424 aa, Artificial Sequence
  Synthetic
IINTSILNLRYESNHLIDLSRYASKINIGSKVNFDPIDKNQIQLFNLESSKIEVILKNAIVYNSMYENFSTSFWIRIPKYFNSISLNNEYTIINCMENNSGWKVSLNYGEIIWTLQDTQEIKQRVVFKYSQMINISDYINRWIFVTITNNRLNNSKIYINGRLIDQKPISNLGNIHASNNIMFKLDGCRDTHRYIWIKYFNLFDKELNEKEIKDLYDNQSNSGILKDFWGDYLQYDKPYYMLNLYDPNKYVDVNNVGIRGYMYLKGPRGSVMTTNIYLNSSLYRGTKFIIKKYASGNKDNIVRNNDRVYINVVVKNKEYRLATNASQAGVEKILSALEIPDVGNLSQVVVMKSKNDQGITNKCKMNLQDNNGNDIGFIGFHQFNNIAKLVASNWYNRQIERSSRTLGCSWEFIPVDDGWGERTL

SEQ ID NO: 86 - protein, 424 aa, Artificial Sequence
  Synthetic
IVNTSILSIVYKKDDLIDLSRYGAKINIGDRVYYDSIDKNQIQLINLESSTIEVILKNAIVYNSMYENFSTSFWIKIPKYFSKINLNNEYTIINCIENNSGWKVSLNYGEIIWTLQDNKQNIQRVVFKYSQMVNISDYINRWIFVTITNNRLTKSKIYINGRLIDQKPISNLGNIHASNKIMFKLDGCRDPRRYIMIKYFNLFDKELNEKEIKDLYDSQSNSGILKDFWGNYLQYDKPYYMLNLFDPNKYVDVNNIGIRGYMYLKGPRGSVVTTNIYLNSTLYEGTKFIIKKYASGNEDNIVRNNDRVYINVVVKNKEYRLATNASQAGVEKILSALEIPDVGNLSQVVVMKSKDDQGIRNKCKMNLQDNNGNDIGFIGFHLYDNIAKLVASNWYNRQVGKASRTFGCSWEFIPVDDGWGESSL

SEQ ID NO: 87 - protein, 424 aa, Artificial Sequence
  Synthetic
IVNTSILSIVYKKDDLIDLSRYGAKINIGDRVYYDSIDKNQIKLINLESSKIEVILKNAIVYNSMYENFSTSFWIKIPKYFSKINLNNEYTIINCIENNSGWKVSLNYGEIIWTLQDNKQNIQRVVFKYSQMVNISDYINRWIFVTITNNRLTKSKIYINGRLIDQKPISNLGNIHASNKIMFKLDGCRDPRRYIMIKYFNLFDKELNEKEIKDLYDSQSNSGILKDFWGNYLQYDKPYYMLNLFDPNKYVDVNNIGIRGYMYLKGPRGSVVTTNIYLNSTLYEGTKFIIKKYASGNEDNIVRNNDRVYINVVVKNKEYRLATNASQAGVEKILSALEIPDVGNLSQVVVMKSKDDQGIRNKCKMNLQDNNGNDIGFIGFHLYDNIAKLVASNWYNRQVGKASRTFGCSWEFIPVDDGWGESSL

SEQ ID NO: 88 - protein, 424 aa, Artificial Sequence
  Synthetic
IVNTSILSIVYKKDDLIDLSRYGAKINIGDRVYYDSIDKNQIKLINLESSTIEVILKNAIVYNSMYENFSTSFWIKIPKYFSKINLNNEYTIINCIENNSGWKVSLNYGEIIWTLQDNKQNIQRVVFKYSQMVNISDYINRWIFVTITNNRLTKSKIYINGRLIDQKPISNLGNIHASNKIMFKLDGCRDPRRYIMIKYFNLFDKELNEKEIKDLYDNQSNSGILKDFWGNYLQYDKPYYMLNLFDPNKYVDVNNIGIRGYMYLKGPRGSVVTTNIYLNSTLYEGTKFIIKKYASGNEDNIVRNNDRVYINVVVKNKEYRLATNASQAGVEKILSALEIPDVGNLSQVVVMKSKDDQGIRNKCKMNLQDNNGNDIGFIGFHLYDNIAKLVASNWYNRQVGKASRTFGCSWEFIPVDDGWGESSL

SEQ ID NO: 89 - protein, 424 aa, Artificial Sequence
  Synthetic
IVNTSILSIVYKKDDLIDLSRYGAKINIGDRVYYDSIDKNQIKLINLESSTIEVILKNAIVYNSMYENFSTSFWIKIPKYFSKINLNNEYTIINCIENNSGWKVSLNYGEIIWTLQDNKQNIQRVVFKYSQMVNISDYINRWIFVTITNNRLTKSKIYINGRLIDQKPISNLGNIHASNKIMFKLDGCRDPRRYIMIKYFNLFDKELNEKEIKDLYDSQSNSGILKDFWGDYLQYDKPYYMLNLFDPNKYVDVNNIGIRGYMYLKGPRGSVVTTNIYLNSTLYEGTKFIIKKYASGNEDNIVRNNDRVYINVVVKNKEYRLATNASQAGVEKILSALEIPDVGNLSQVVVMKSKDDQGIRNKCKMNLQDNNGNDIGFIGFHLYDNIAKLVASNWYNRQVGKASRTFGCSWEFIPVDDGWGESSL

SEQ ID NO: 90 - protein, 424 aa, Artificial Sequence
  Synthetic
IVNTSILSIVYKKDDLIDLSRYGAKINIGDRVYYDSIDKNQIKLINLESSTIEVILKNAIVYNSMYENFSTSFWIKIPKYFSKINLNNEYTIINCIENNSGWKVSLNYGEIIWTLQDNKQNIQRVVFKYSQMVNISDYINRWIFVTITNNRLTKSKIYINGRLIDQKPISNLGNIHASNKIMFKLDGCRDPRRYIMIKYFNLFDKELNEKEIKDLYDSQSNSGILKDFWGNYLQYDKPYYMLNLYDPNKYVDVNNIGIRGYMYLKGPRGSVVTTNIYLNSTLYEGTKFIIKKYASGNEDNIVRNNDRVYINVVVKNKEYRLATNASQAGVEKILSALEIPDVGNLSQVVVMKSKDDQGIRNKCKMNLQDNNGNDIGFIGFHLYDNIAKLVASNWYNRQVGKASRTFGCSWEFIPVDDGWGESSL

SEQ ID NO: 91 - protein, 424 aa, Artificial Sequence
  Synthetic
IVNTSILSIVYKKDDLIDLSRYGAKINIGDRVYYDSIDKNQIKLINLESSTIEVILKNAIVYNSMYENFSTSFWIKIPKYFSKINLNNEYTIINCIENNSGWKVSLNYGEIIWTLQDNKQNIQRVVFKYSQMVNISDYINRWIFVTITNNRLTKSKIYINGRLIDQKPISNLGNIHASNKIMFKLDGCRDPRRYIMIKYFNLFDKELNEKEIKDLYDSQSNSGILKDFWGNYLQYDKPYYMLNLFDPNKYVDVNNIGIRGYMYLKGPRGSVVTTNIYLNSTLYMGTKFIIKKYASGNEDNIVRNNDRVYINVVVKNKEYRLATNASQAGVEKILSALEIPDVGNLSQVVVMKSKDDQGIRNKCKMNLQDNNGNDIGFIGFHLYDNIAKLVASNWYNRQVGKASRTFGCSWEFIPVDDGWGESSL

SEQ ID NO: 92 - protein, 424 aa, Artificial Sequence
  Synthetic
IVNTSILSIVYKKDDLIDLSRYGAKINIGDRVYYDSIDKNQIKLINLESSTIEVILKNAIVYNSMYENFSTSFWIKIPKYFSKINLNNEYTIINCIENNSGWKVSLNYGEIIWTLQDNKQNIQRVVFKYSQMVNISDYINRWIFVTITNNRLTKSKIYINGRLIDQKPISNLGNIHASNKIMFKLDGCRDPRRYIMIKYFNLFDKELNEKEIKDLYDSQSNSGILKDFWGNYLQYDKPYYMLNLFDPNKYVDVNNIGIRGYMYLKGPRGSVVTTNIYLNSTLYEGTKFIIKKYASGNKDNIVRNNDRVYINVVVKNKEYRLATNASQAGVEKILSALEIPDVGNLSQVVVMKSKDDQGIRNKCKMNLQDNNGNDIGFIGFHLYDNIAKLVASNWYNRQVGKASRTFGCSWEFIPVDDGWGESSL

SEQ ID NO: 93 - protein, 424 aa, Artificial Sequence
  Synthetic
IVNTSILSIVYKKDDLIDLSRYGAKINIGDRVYYDSIDKNQIKLINLESSTIEVILKNAIVYNSMYENFSTSFWIKIPKYFSKINLNNEYTIINCIENNSGWKVSLNYGEIIWTLQDNKQNIQRVVFKYSQMVNISDYINRWIFVTITNNRLTKSKIYINGRLIDQKPISNLGNIHASNKIMFKLDGCRDPRRYIMIKYFNLFDKELNEKEIKDLYDSQSNSGILKDFWGNYLQYDKPYYMLNLFDPNKYVDVNNIGIRGYMYLKGPRGSVVTTNIYLNSTLYEGTKFIIKKYASGNEDNIVRNNDRVYINVVVKNKEYRLATNASQAGVEKILSALEIPDVGNLSQVVVMKSKNDQGIRNKCKMNLQDNNGNDIGFIGFHLYDNIAKLVASNWYNRQVGKASRTFGCSWEFIPVDDGWGESSL

SEQ ID NO: 94 - protein, 424 aa, Artificial Sequence
  Synthetic
IVNTSILSIVYKKDDLIDLSRYGAKINIGDRVYYDSIDKNQIKLINLESSTIEVILKNAIVYNSMYENFSTSFWIKIPKYFSKINLNNEYTIINCIENNSGWKVSLNYGEIIWTLQDNKQNIQRVVFKYSQMVNISDYINRWIFVTITNNRLTKSKIYINGRLIDQKPISNLGNIHASNKIMFKLDGCRDPRRYIMIKYFNLFDKELNEKEIKDLYDSQSNSGILKDFWGNYLQYDKPYYMLNLFDPNKYVDVNNIGIRGYMYLKGPRGSVVTTNIYLNSTLYEGTKFIIKKYASGNEDNIVRNNDRVYINVVVKNKEYRLATNASQAGVEKILSALEIPDVGNLSQVVVMKSKDDQGIRNKCKMNLQDNNGNDIGFIGFHQYDNIAKLVASNWYNRQVGKASRTFGCSWEFIPVDDGWGESSL

SEQ ID NO: 95 - protein, 424 aa, Artificial Sequence
  Synthetic
IVNTSILSIVYKKDDLIDLSRYGAKINIGDRVYYDSIDKNQIKLINLESSTIEVILKNAIVYNSMYENFSTSFWIKIPKYFSKINLNNEYTIINCIENNSGWKVSLNYGEIIWTLQDNKQNIQRVVFKYSQMVNISDYINRWIFVTITNNRLTKSKIYINGRLIDQKPISNLGNIHASNKIMFKLDGCRDPRRYIMIKYFNLFDKELNEKEIKDLYDSQSNSGILKDFWGNYLQYDKPYYMLNLFDPNKYVDVNNIGIRGYMYLKGPRGSVVTTNIYLNSTLYEGTKFIIKKYASGNEDNIVRNNDRVYINVVVKNKEYRLATNASQAGVEKILSALEIPDVGNLSQVVVMKSKDDQGIRNKCKMNLQDNNGNDIGFIGFHLFDNIAKLVASNWYNRQVGKASRTFGCSWEFIPVDDGWGESSL

SEQ ID NO: 96 - protein, 424 aa, Artificial Sequence
  Synthetic
IVNTSILSIVYKKDDLIDLSRYGAKINIGDRVYYDSIDKNQIKLINLESSTIEVILKNAIVYNSMYENFSTSFWIKIPKYFSKINLNNEYTIINCIENNSGWKVSLNYGEIIWTLQDNKQNIQRVVFKYSQMVNISDYINRWIFVTITNNRLTKSKIYINGRLIDQKPISNLGNIHASNKIMFKLDGCRDPRRYIMIKYFNLFDKELNEKEIKDLYDSQSNSGILKDFWGNYLQYDKPYYMLNLFDPNKYVDVNNIGIRGYMYLKGPRGSVVTTNIYLNSTLYEGTKFIIKKYASGNEDNIVRNNDRVYINVVVKNKEYRLATNASQAGVEKILSALEIPDVGNLSQVVVMKSKDDQGIRNKCKMNLQDNNGNDIGFIGFHLYNNIAKLVASNWYNRQVGKASRTFGCSWEFIPVDDGWGESSL

SEQ ID NO: 97 - protein, 857 aa, Artificial Sequence
  Synthetic
MPVTINNFNYNDPIDNNNIIMMEPPFARGTGRYYKAFKITDRIWIIPERYTFGYKPEDFNKSSGIFNRDVCEYYDPDYLNTNDKKNIFLQTMIKLFNRIKSKPLGEKLLEMIINGIPYLGDRRVPLEEFNTNIASVTVNKLISNPGEVERKKGIFANLIIFGPGPVLNENETIDIGIQNHFASREGFGGIMQMKFCPEYVSVFNNVQENKGASIFNRRGYFSDPALILMHELIHVLHGLYGIKVDDLPIVPNEKKFFMQSTDAIQAEELYTFGGQDPSIITPSTDKSIYDKVLQNFRGIVDRLNKVLVCISDPNININIYKNKFKDKYKFVEDSEGKYSIDVESFDKLYKSLMFGFTETNIAENYKIKTRASYFSDSLPPVKIKNLLDNEIYTIEEGFNISDKDMEKEYRGQNKAINKQAYEEISKEHLAVYKIQMCKSVKAPGICIDVDNEDLFFIADKNSFSDDLSKNERIEYNTQSNYIENDFPINELILDTDLISKIELPSENTESLTDFNVDVPVYEKQPAIKKIFTDENTIFQYLYSQTFPLDIRDISLTSSFDDALLFSNKVYSFFSMDYIKTANKVVEAGLFAGWVKQIVNDFVIEANKSNTMDKIADISLIVPYIGLALNVGNETAKGNFENAFEIAGASILLEFIPELLIPVVGAFLLESYIDNKNKIIKTIDNALTKRNEKWSDMYGLIVAQWLSTVNTQFYTIKEGMYKALNYQAQALEEIIKYRYNIYSEKEKSNINIDFNDINSKLNEGINQAIDNINNFINGCSVSYLMKKMIPLAVEKLLDFDNTLKKNLLNYIDENKLYLIGSAEYEKSKVNKYLKTIMPFDLSIYTNDTILIEMFNKYN

SEQ ID NO: 98 - protein, 870 aa, Artificial Sequence
  Synthetic
MPITINNFNYSDPVDNKNILYLDTHLNTLANEPEKAFRITGNIWVIPDRFSRNSNPNLNKPPRVTSPKSGYYDPNYLSTDSDKDTFLKEIIKLFKRINSREIGEELIYRLSTDIPFPGNNNTPINTFDFDVDFNSVDVKTRQGNNWVKTGSINPSVIITGPRENIIDPETSTFKLTNNTFAAQEGFGALSIISISPRFMLTYSNATNDVGEGRFSKSEFCMDPILILMHELNHAMHNLYGIAIPNDQTISSVTSNIFYSQYNVKLEYAEIYAFGGPTIDLIPKSARKYFEEKALDYYRSIAKRLNSITTANPSSFNKYIGEYKQKLIRKYRFVVESSGEVTVNRNKFVELYNELTQIFTEFNYAKIYNVQNRKIYLSNVYTPVTANILDDNVYDIQNGFNIPKSNLNVLFMGQNLSRNPALRKVNPENMLYLFTKFCHKAIDGRSLYNKTLDCRELLVKNTDLPFIGDISDVKTDIFLRKDINEETEVIYYPDNVSVDQVILSKNTSEHGQLDLLYPSIDSESEILPGENQVFYDNRTQNVDYLNSYYYLESQKLSDNVEDFTFTRSIEEALDNSAKVYTYFPTLANKVNAGVQGGLFLMWANDVVEDFTTNILRKDTLDKISDVSAIIPYIGPALNISNSVRRGNFTEAFAVTGVTILLEAFPEFTIPALGAFVIYSKVQERNEIIKTIDNCLEQRIKRWKDSYEWMMGTWLSRIITQFNNISYQMYDSLNYQAGAIKAKIDLEYKKYSGSDKENIKSQVENLKNSLDVKISEAMNNINKFIRECSVTYLFKNMLPKVIDELNEFDRNTKAKLINLIDSHNIILVGEVDKLKAKVNNSFQNTIPFNIFSYTNNSLLKDIINEYFNNIND

SEQ ID NO: 99 - protein, 862 aa, Artificial Sequence
  Synthetic
MTWPVKDFNYSDPVNDNDILYLRIPQNKLITTPVKAFMITQNIWVIPERFSSDTNPSLSKPPRPTSKYQSYYDPSYLSTDEQKDTFLKGIIKLFKRINERDIGKKLINYLVVGSPFMGDSSTPEDTFDFTRHTTNIAVEKFENGSWKVTNIITPSVLIFGPLPNILDYTASLTLQGQQSNPSFEGFGTLSILKVAPEFLLTFSDVTSNQSSAVLGKSIFCMDPVIALMHELTHSLHQLYGINIPSDKRIRPQVSEGFFSQDGPNVQFEELYTFGGLDVEIIPQIERSQLREKALGHYKDIAKRLNNINKTIPSSWISNIDKYKKIFSEKYNFDKDNTGNFVVNIDKFNSLYSDLTNVMSEVVYSSQYNVKNRTHYFSRHYLPVFANILDDNIYTIRDGFNLTNKGFNIENSGQNIERNPALQKLSSESVVDLFTKVCLRLTKNSRDDSTCIKVKNNRLPYVADKDSISQEIFENKIITDETNVQNYSDNFSLDESILDGQVPINPEIVDPLLPNVNMEPLNLPGEEIVFYDDITKYVDYLNSYYYLESQKLSNNVENITLTTSVEEALGYSNKIYTFLPSLAEKVNKGVQAGLFLNWANEVVEDFTTNIMKKDTLDKISDVSVIIPYIGPALNIGNSALRGNFKQAFATAGVAFLLEGFPEFTIPALGVFTFYSSIQEREKIIKTIENCLEQRVKRWKDSYQWMVSNWLSRITTQFNHINYQMYDSLSYQADAIKAKIDLEYKKYSGSDKENIKSQVENLKNSLDVKISEAMNNINKFIRECSVTYLFKNMLPKVIDELNKFDLRTKTELINLIDSHNIILVGEVDRLKAKVNESFENTMPFNIFSYTNNSLLKDIINEYFN

SEQ ID NO: 100 - protein, 844 aa, Artificial Sequence
  Synthetic
MPKINSFNYNDPVNDRTILYIKPGGCQEFYKSFNIMKNIWIIPERNVIGTTPQDFHPPTSLKNGDSSYYDPNYLQSDEEKDRFLKIVTKIFNRINNNLSGGILLEELSKANPYLGNDNTPDNQFHIGDASAVEIKFSNGSQDILLPNVIIMGAEPDLFETNSSNISLRNNYMPSNHRFGSIAIVTFSPEYSFRFNDNCMNEFIQDPALTLMHELIHSLHGLYGAKGITTKYTITQKQNPLITNIRGTNIEEFLTFGGTDLNIITSAQSNDIYTNLLADYKKIASKLSKVQVSNPLLNPYKDVFEAKYGLDKDASGIYSVNINKFNDIFKKLYSFTEFDLRTKFQVKCRQTYIGQYKYFKLSNLLNDSIYNISEGYNINNLKVNFRGQNANLNPRIITPITGRGLVKKIIRFCKNIVSVKGIRKSICIEINNGELFFVASENSYNDDNINTPKEIDDTVTSNNNYENDLDQVILNFNSESAPGLSDEKLNLTIQNDAYIPKYDSNGTSDIEQHDVNELNVFFYLDAQKVPEGENNVNLTSSIDTALLEQPKIYTFFSSEFINNVNKPVQAALFVSWIQQVLVDFTTEANQKSTVDKIADISIVVPYIGLALNIGNEAQKGNFKDALELLGAGILLEFEPELLIPTILVFTIKSFLGSSDNKNKVIKAINNALKERDEKWKEVYSFIVSNWMTKINTQFNKRKEQMYQALQNQVNAIKTIIESKYNSYTLEEKNELTNKYDIKQIENELNQKVSIAMNNIDRFLTESSISYLMKIINEVKINKLREYDENVKTYLLNYIIQHGSILGESQQELNSMVTDTLNNSIPFKLSSYTDDKILISYFNKFF

SEQ ID NO: 101 - protein, 863 aa, Artificial Sequence
  Synthetic
MPVVINSFNYNDPVNDDTILYMQIPYEEKSKKYYKAFEIMRNVWIIPERNTIGTDPSDFDPPASLENGSSAYYDPNYLTTDAEKDRYLKTTIKLFKRINSNPAGEVLLQEISYAKPYLGNEHTPINEFHPVTRTTSVNIKSSTNVKSSIILNLLVLGAGPDIFENSSYPVRKLMDSGGVYDPSNDGFGSINIVTFSPEYEYTFNDISGGYNSSTESFIADPAISLAHELIHALHGLYGARGVTYKETIKVKQAPLMIAEKPIRLEEFLTFGGQDLNIITSAMKEKIYNNLLANYEKIATRLSRVNSAPPEYDINEYKDYFQWKYGLDKNADGSYTVNENKFNEIYKKLYSFTEIDLANKFKVKCRNTYFIKYGFLKVPNLLDDDIYTVSEGFNIGNLAVNNRGQNIKLNPKIIDSIPDKGLVEKIVKFCKSVIPRKGTKAPPRLCIRVNNRELFFVASESSYNENDINTPKEIDDTTNLNNNYRNNLDEVILDYNSETIPQISNQTLNTLVQDDSYVPRYDSNGTSEIEEHNVVDLNVFFYLHAQKVPEGETNISLTSSIDTALSEESQVYTFFSSEFINTINKPVHAALFISWINQVIRDFTTEATQKSTFDKIADISLVVPYVGLALNIGNEVQKENFKEAFELLGAGILLEFVPELLIPTILVFTIKSFIGSSENKNKIIKAINNSLMERETKWKEIYSWIVSNWLTRINTQFNKRKEQMYQALQNQVDAIKTVIEYKYNNYTSDERNRLESEYNINNIREELNKKVSLAMENIERFITESSIFYLMKLINEAKVSKLREYDEGVKEYLLDYISEHRSILGNSVQELNDLVTSTLNNSIPFELSSYTNDKILILYFNKLY

SEQ ID NO: 102 - protein, 858 aa, Artificial Sequence
  Synthetic
MPVVINSFNYDDPVNDNTIIYIRPPYYETSNTYFKAFQIMDNVWIIPERYRLGIDPSLFNPPVSLKAGSDGYFDPNYLSTNTEKNKYLQIMIKLFKRINSKPAGQILLEEIKNAIPYLGNSYTQEEQFTTNNRTVSFNVKLANGNIVQQMANLIIWGPGPDLTTNKTGGIIYSPYQSMEATPYKDGFGSIMTVEFSPEYATAFNDISIASHSPSLFIKDPALILMHELIHVLHGLYGTYITEYKITPNVVQSYMKVTKPITSAEFLTFGGRDRNIVPQSIQSQLYNKVLSDYKRIASRLNKVNTATALINIDEFKNLYEWKYQFAKDSNGVYSVDLNKFEQLYKKIYSFTEFNLAYEFKIKTRLGYLAENFGPFYLPNLLDDSIYTEVDGFNIGALSINYQGQNIGSDINSIKKLQGQGVVSRVVRLCSNSNTKNSLCITVNNRDLFFIASQESYGENTINTYKEIDDTTTLDPSFEDILDKVILNFNEQVIPQMPNRNVSTDIQKDNYIPKYDYNRTDIIDSYEVGRNYNTFFYLNAQKFSPNESNITLTSSFDTGLLEGSKVYTFFSSDFINNINKPVQALLFIEWVKQVIRDFTTEATKTSTVDKLKDISLVVPYIGLALNIGDEIYKQHFAEAVELVGAGLLLEFSPEFLIPTLLIFTIKGYLTGSIRDKDKIIKTLDNALNVRDQKWKELYRWVVSKWLTTINTQFNKRKEQMYKALKNQATAIKKIIENKYNNYTTDEKSKIDSSYNINEIERTLNEKINLAMKNIEQFITESSIAYLINIINNETIQKLKSYDDLVRRYLLGYIRNHSSILGNSVEELNSKVNNHLDNGIPFELSSYTNDSLLIRYFNKNY

SEQ ID NO: 103 - protein, 889 aa, Artificial Sequence
  Synthetic
MKLEINKFNYNDPIDGINVITMRPPRHSDKINKGKGPFKAFQVIKNIWIVPERYNFTNNTNDLNIPSEPIMEADAIYNPNYLNTPSEKDEFLQGVIKVLERIKSKPEGEKLLELISSSIPLPLVSNGALTLSDNETIAYQENNNIVSNLQANLVIYGPGPDIANNATYGLYSTPISNGEGTLSEVSFSPFYLKPFDESYGNYRSLVNIVNKFVKREFAPDPASTLMHELVHVTHNLYGISNRNFYYNFDTGKIETSRQQNSLIFEELLTFGGIDSKAISSLIIKKIIETAKNNYTTLISERLNTVTVENDLLKYIKNKIPVQGRLGNFKLDTAEFEKKLNTILFVLNESNLAQRFSILVRKHYLKERPIDPIYVNILDDNSYSTLEGFNISSQGSNDFQGQLLESSYFEKIESNALRAFIKICPRNGLLYNAIYRNSKNYLNNIDLEDKKTTSKTNVSYPCSLLNGCIEVENKDLFLISNKDSLNDINLSEEKIKPETTVFFKDKLPPQDITLSNYDFTEANSIPSISQQNILERNEELYEPIRNSLFEIKTIYVDKLTTFHFLEAQNIDESIDSSKIRVELTDSVDEALSNPNKVYSPFKNMSNTINSIETGITSTYIFYQWLRSIVKDFSDETGKIDVIDKSSDTLAIVPYIGPLLNIGNDIRHGDFVGAIELAGITALLEYVPEFTIPILVGLEVIGGELAREQVEAIVNNALDKRDQKWAEVYNITKAQWWGTIHLQINTRLAHTYKALSRQANAIKMNMEFQLANYKGNIDDKAKIKNAISETEILLNKSVEQAMKNTEKFMIKLSNSYLTKEMIPKVQDNLKNFDLETKKTLDKFIKEKEDILGTNLSSSLRRKVSIRLNKNIAFDINDIPFSEFDDLINQYK

SEQ ID NO: 104 - protein, 874 aa, Artificial Sequence
  Synthetic
MVTINDLHYSDPIDEDNIINMRIPLYDLEVDDQFINHNVPDLKAFQVFPNVWVVPERYTFYSTMKNLDAPANPSRSSYYDPTYLQSDAEKEVFLQQMILLFKRINSTQEGQQFLNLLSRSIPVPYESNGDVAMGTTQVIKQMDDKGNVLKHRRAHIIIYGPGPDLMAKGSKALTKSRETGRGCMAEIYFSPMYHKTYSTKLTNKNSLVDKSVQEFVPDPAVTLIHELCHGLHALYGIDLGNVGSWEFNSNPNSLFSSWFSSKEAVNFEEVMTFGGEDVKVIKSEIDKKIPGILNLIKTTVEPIINKITDPHDEMLQCLQSKYPSLKGTLGQFFFDDTQLEKDIRDLWMVMNETMFAENLKALTRARYLVPKVENIVQVDILSPNVYTIDKGFNHLSKGFKGQSVSQSYFRKISALARGAVVRACPNPHFSSQRGLSSCIEILEDDLFIMSSKDSFTDTDFSEPSVGPVSYKAKKGADTILDSTLSNYDFSKEINFTSTVPIITVEDPLETDEDVPVISEDRTVYVDDYTTFHFLEAQKIGKEVVPTQTKVVFTTNMEEALFDSKKVYTVFENTASRINEAGTGIANGMMFYQWLKGIVQDFTEEATQKDTFDKISDVTMIVPYLGNILNIGNDIRKGDFMGAVELGGVTILLEAIPELTLPVLIGLTIIEDELEKEQVSQTVYNVLDKRDEKWEEVYGFVKQQWWWMVHTQFETRILHAYQALNHQVEAIKANMTYQLANYRGNQEDKELLEKAIDDTLQSLYYAVDQAMHNIKRFLIQSSKSYLLNQMLPKTKEQLLAFDQQTLRNVNDFINKNQGVLGESLAKDLKKKVEKRLTSLPVFNLEDLPISEFEDLIHSHEIDIQDSEVLNIGVNN

SEQ ID NO: 105 - protein, 862 aa, Artificial Sequence
  Synthetic
  misc_feature (7)..(7): Xaa can be any naturally occurring amino acid
MPVNIKXFNYNDPINNDDIIMMEPFNDPGPGTYYKAFRIIDRIWIVPERFTYGFQPDQFNASTGVFSKDVYEYYDPTYLKTDAEKDKFLKTMIKLFNRINSKPSGQRLLDMIVDAIPYLGNASTPPDKFAANVANVSINKKIIQPGAEDQIKGLMTNLIIFGPGPVLSDNFTDSMIMNGHSPISEGFGARMMIRFCPSCLNVFNNVQENKDTSIFSRRAYFADPALTLMHELIHVLHGLYGIKISNLPITPNTKEFFMQHSDPVQAEELYTFGGHDPSVISPSTDMNIYNKALQNFQDIANRLNIVSSAQGSGIDISLYKQIYKNKYDFVEDPNGKYSVDKDKFDKLYKALMFGFTETNLAGEYGIKTRYSYFSEYLPPIKTEKLLDNTIYTQNEGFNIASKNLKTEFNGQNKAVNKEAYEEISLEHLVIYRIAMCKPVMYKNTGKSEQCIIVNNEDLFFIANKDSFSKDLAKAETIAYNTQNNTIENNFSIDQLILDNDLSSGIDLPNENTEPFTNFDDIDIPVYIKQSALKKIFVDGDSLFEYLHAQTFPSNIENLQLTNSLNDALRNNNKVYTFFSTNLVEKANTVVGASLFVNWVKGVIDDFTSESTQKSTIDKVSDVSIIIPYIGPALNVGNETAKENFKNAFEIGGAAILMEFIPELIVPIVGFFTLESYVGNKGHIIMTISNALKKRDQKWTDMYGLIVSQWLSTVNTQFYTIKERMYNALNNQSQAIEKIIEDQYNRYSEEDKMNINIDFNDIDFKLNQSINLAINNIDDFINQCSISYLMNRMIPLAVKKLKDFDDNLKRDLLEYIDTNELYLLDEVNILKSKVNRHLKDSIPFDLSLYTKDTILIQVFNNYI

SEQ ID NO: 106 - protein, 1281 aa, Artificial Sequence
  Synthetic
MPVTINNFNYNDPIDNNNIIMMEPPFARGTGRYYKAFKITDRIWIIPERYTFGYKPEDFNKSSGIFNRDVCEYYDPDYLNTNDKKNIFLQTMIKLFNRIKSKPLGEKLLEMIINGIPYLGDRRVPLEEFNTNIASVTVNKLISNPGEVERKKGIFANLIIFGPGPVLNENETIDIGIQNHFASREGFGGIMQMKFCPEYVSVFNNVQENKGASIFNRRGYFSDPALILMHELIHVLHGLYGIKVDDLPIVPNEKKFFMQSTDAIQAEELYTFGGQDPSIITPSTDKSIYDKVLQNFRGIVDRLNKVLVCISDPNININIYKNKFKDKYKFVEDSEGKYSIDVESFDKLYKSLMFGFTETNIAENYKIKTRASYFSDSLPPVKIKNLLDNEIYTIEEGFNISDKDMEKEYRGQNKAINKQAYEEISKEHLAVYKIQMCKSVKAPGICIDVDNEDLFFIADKNSFSDDLSKNERIEYNTQSNYIENDFPINELILDTDLISKIELPSENTESLTDFNVDVPVYEKQPAIKKIFTDENTIFQYLYSQTFPLDIRDISLTSSFDDALLFSNKVYSFFSMDYIKTANKVVEAGLFAGWVKQIVNDFVIEANKSNTMDKIADISLIVPYIGLALNVGNETAKGNFENAFEIAGASILLEFIPELLIPVVGAFLLESYIDNKNKIIKTIDNALTKRNEKWSDMYGLIVAQWLSTVNTQFYTIKEGMYKALNYQAQALEEIIKYRYNIYSEKEKSNINIDFNDINSKLNEGINQAIDNINNFINGCSVSYLMKKMIPLAVEKLLDFDNTLKKNLLNYIDENKLYLIGSAEYEKSKVNKYLKTIMPFDLSIYTNDTILIEMFNKYNIINTSILNLRYESNHLIDLSRYASKINIGSKVNFDPIDKNQIQLFNLESSKIEVILKNAIVYNSMYENFSTSFWIRIPKYFNSISLNNEYTIINCMENNSGWKVSLNYGEIIWTLQDTQEIKQRVVFKYSQMINISDYINRWIFVTITNNRLNNSKIYINGRLIDQKPISNLGNIHASNNIMFKLDGCRDTHRYIWIKYFNLFDKELNEKEIKDLYDNQSNSGILKDFWGDYLQYDKPYYMLNLYDPNKYVDVNNVGIRGYMYLKGPRGSVMTTNIYLNSSLYRGTKFIIKKYASGNKDNIVRNNDRVYINVVVKNKEYRLATNASQAGVEKILSALEIPDVGNLSQVVVMKSKNDQGITNKCKMNLQDNNGNDIGFIGFHQFNNIAKLVASNWYNRQIERSSRTLGCSWEFIPVDDGWGERPL

SEQ ID NO: 107 - protein, 1294 aa, Artificial Sequence
  Synthetic
MPITINNFNYSDPVDNKNILYLDTHLNTLANEPEKAFRITGNIWVIPDRFSRNSNPNLNKPPRVTSPKSGYYDPNYLSTDSDKDTFLKEIIKLFKRINSREIGEELIYRLSTDIPFPGNNNTPINTFDFDVDFNSVDVKTRQGNNWVKTGSINPSVIITGPRENIIDPETSTFKLTNNTFAAQEGFGALSIISISPRFMLTYSNATNDVGEGRFSKSEFCMDPILILMHELNHAMHNLYGIAIPNDQTISSVTSNIFYSQYNVKLEYAEIYAFGGPTIDLIPKSARKYFEEKALDYYRSIAKRLNSITTANPSSFNKYIGEYKQKLIRKYRFVVESSGEVTVNRNKFVELYNELTQIFTEFNYAKIYNVQNRKIYLSNVYTPVTANILDDNVYDIQNGFNIPKSNLNVLFMGQNLSRNPALRKVNPENMLYLFTKFCHKAIDGRSLYNKTLDCRELLVKNTDLPFIGDISDVKTDIFLRKDINEETEVIYYPDNVSVDQVILSKNTSEHGQLDLLYPSIDSESEILPGENQVFYDNRTQNVDYLNSYYYLESQKLSDNVEDFTFTRSIEEALDNSAKVYTYFPTLANKVNAGVQGGLFLMWANDVVEDFTTNILRKDTLDKISDVSAIIPYIGPALNISNSVRRGNFTEAFAVTGVTILLEAFPEFTIPALGAFVIYSKVQERNEIIKTIDNCLEQRIKRWKDSYEWMMGTWLSRIITQFNNISYQMYDSLNYQAGAIKAKIDLEYKKYSGSDKENIKSQVENLKNSLDVKISEAMNNINKFIRECSVTYLFKNMLPKVIDELNEFDRNTKAKLINLIDSHNIILVGEVDKLKAKVNNSFQNTIPFNIFSYTNNSLLKDIINEYFNNINDIINTSILNLRYESNHLIDLSRYASKINIGSKVNFDPIDKNQIQLFNLESSKIEVILKNAIVYNSMYENFSTSFWIRIPKYFNSISLNNEYTIINCMENNSGWKVSLNYGEIIWTLQDTQEIKQRVVFKYSQMINISDYINRWIFVTITNNRLNNSKIYINGRLIDQKPISNLGNIHASNNIMFKLDGCRDTHRYIWIKYFNLFDKELNEKEIKDLYDNQSNSGILKDFWGDYLQYDKPYYMLNLYDPNKYVDVNNVGIRGYMYLKGPRGSVMTTNIYLNSSLYRGTKFIIKKYASGNKDNIVRNNDRVYINVVVKNKEYRLATNASQAGVEKILSALEIPDVGNLSQVVVMKSKNDQGITNKCKMNLQDNNGNDIGFIGFHQFNNIAKLVASNWYNRQIERSSRTLGCSWEFIPVDDGWGERPL

SEQ ID NO: 108 - protein, 1286 aa, Artificial Sequence
  Synthetic
MTWPVKDFNYSDPVNDNDILYLRIPQNKLITTPVKAFMITQNIWVIPERFSSDTNPSLSKPPRPTSKYQSYYDPSYLSTDEQKDTFLKGIIKLFKRINERDIGKKLINYLVVGSPFMGDSSTPEDTFDFTRHTTNIAVEKFENGSWKVTNIITPSVLIFGPLPNILDYTASLTLQGQQSNPSFEGFGTLSILKVAPEFLLTFSDVTSNQSSAVLGKSIFCMDPVIALMHELTHSLHQLYGINIPSDKRIRPQVSEGFFSQDGPNVQFEELYTFGGLDVEIIPQIERSQLREKALGHYKDIAKRLNNINKTIPSSWISNIDKYKKIFSEKYNFDKDNTGNFVVNIDKFNSLYSDLTNVMSEVVYSSQYNVKNRTHYFSRHYLPVFANILDDNIYTIRDGFNLTNKGFNIENSGQNIERNPALQKLSSESVVDLFTKVCLRLTKNSRDDSTCIKVKNNRLPYVADKDSISQEIFENKIITDETNVQNYSDNFSLDESILDGQVPINPEIVDPLLPNVNMEPLNLPGEEIVFYDDITKYVDYLNSYYYLESQKLSNNVENITLTTSVEEALGYSNKIYTFLPSLAEKVNKGVQAGLFLNWANEVVEDFTTNIMKKDTLDKISDVSVIIPYIGPALNIGNSALRGNFKQAFATAGVAFLLEGFPEFTIPALGVFTFYSSIQEREKIIKTIENCLEQRVKRWKDSYQWMVSNWLSRITTQFNHINYQMYDSLSYQADAIKAKIDLEYKKYSGSDKENIKSQVENLKNSLDVKISEAMNNINKFIRECSVTYLFKNMLPKVIDELNKFDLRTKTELINLIDSHNIILVGEVDRLKAKVNESFENTMPFNIFSYTNNSLLKDIINEYFNIINTSILNLRYESNHLIDLSRYASKINIGSKVNFDPIDKNQIQLFNLESSKIEVILKNAIVYNSMYENFSTSFWIRIPKYFNSISLNNEYTIINCMENNSGWKVSLNYGEIIWTLQDTQEIKQRVVFKYSQMINISDYINRWIFVTITNNRLNNSKIYINGRLIDQKPISNLGNIHASNNIMFKLDGCRDTHRYIWIKYFNLFDKELNEKEIKDLYDNQSNSGILKDFWGDYLQYDKPYYMLNLYDPNKYVDVNNVGIRGYMYLKGPRGSVMTTNIYLNSSLYRGTKFIIKKYASGNKDNIVRNNDRVYINVVVKNKEYRLATNASQAGVEKILSALEIPDVGNLSQVVVMKSKNDQGITNKCKMNLQDNNGNDIGFIGFHQFNNIAKLVASNWYNRQIERSSRTLGCSWEFIPVDDGWGERPL

SEQ ID NO: 109 - protein, 1268 aa, Artificial Sequence
  Synthetic
MPKINSFNYNDPVNDRTILYIKPGGCQEFYKSFNIMKNIWIIPERNVIGTTPQDFHPPTSLKNGDSSYYDPNYLQSDEEKDRFLKIVTKIFNRINNNLSGGILLEELSKANPYLGNDNTPDNQFHIGDASAVEIKFSNGSQDILLPNVIIMGAEPDLFETNSSNISLRNNYMPSNHRFGSIAIVTFSPEYSFRFNDNCMNEFIQDPALTLMHELIHSLHGLYGAKGITTKYTITQKQNPLITNIRGTNIEEFLTFGGTDLNIITSAQSNDIYTNLLADYKKIASKLSKVQVSNPLLNPYKDVFEAKYGLDKDASGIYSVNINKFNDIFKKLYSFTEFDLRTKFQVKCRQTYIGQYKYFKLSNLLNDSIYNISEGYNINNLKVNFRGQNANLNPRIITPITGRGLVKKIIRFCKNIVSVKGIRKSICIEINNGELFFVASENSYNDDNINTPKEIDDTVTSNNNYENDLDQVILNFNSESAPGLSDEKLNLTIQNDAYIPKYDSNGTSDIEQHDVNELNVFFYLDAQKVPEGENNVNLTSSIDTALLEQPKIYTFFSSEFINNVNKPVQAALFVSWIQQVLVDFTTEANQKSTVDKIADISIVVPYIGLALNIGNEAQKGNFKDALELLGAGILLEFEPELLIPTILVFTIKSFLGSSDNKNKVIKAINNALKERDEKWKEVYSFIVSNWMTKINTQFNKRKEQMYQALQNQVNAIKTIIESKYNSYTLEEKNELTNKYDIKQIENELNQKVSIAMNNIDRFLTESSISYLMKIINEVKINKLREYDENVKTYLLNYIIQHGSILGESQQELNSMVTDTLNNSIPFKLSSYTDDKILISYFNKFFIINTSILNLRYESNHLIDLSRYASKINIGSKVNFDPIDKNQIQLFNLESSKIEVILKNAIVYNSMYENFSTSFWIRIPKYFNSISLNNEYTIINCMENNSGWKVSLNYGEIIWTLQDTQEIKQRVVFKYSQMINISDYINRWIFVTITNNRLNNSKIYINGRLIDQKPISNLGNIHASNNIMFKLDGCRDTHRYIWIKYFNLFDKELNEKEIKDLYDNQSNSGILKDFWGDYLQYDKPYYMLNLYDPNKYVDVNNVGIRGYMYLKGPRGSVMTTNIYLNSSLYRGTKFIIKKYASGNKDNIVRNNDRVYINVVVKNKEYRLATNASQAGVEKILSALEIPDVGNLSQVVVMKSKNDQGITNKCKMNLQDNNGNDIGFIGFHQFNNIAKLVASNWYNRQIERSSRTLGCSWEFIPVDDGWGERPL

SEQ ID NO: 110 - protein, 1287 aa, Artificial Sequence
  Synthetic
MPVVINSFNYNDPVNDDTILYMQIPYEEKSKKYYKAFEIMRNVWIIPERNTIGTDPSDFDPPASLENGSSAYYDPNYLTTDAEKDRYLKTTIKLFKRINSNPAGEVLLQEISYAKPYLGNEHTPINEFHPVTRTTSVNIKSSTNVKSSIILNLLVLGAGPDIFENSSYPVRKLMDSGGVYDPSNDGFGSINIVTFSPEYEYTFNDISGGYNSSTESFIADPAISLAHELIHALHGLYGARGVTYKETIKVKQAPLMIAEKPIRLEEFLTFGGQDLNIITSAMKEKIYNNLLANYEKIATRLSRVNSAPPEYDINEYKDYFQWKYGLDKNADGSYTVNENKFNEIYKKLYSFTEIDLANKFKVKCRNTYFIKYGFLKVPNLLDDDIYTVSEGFNIGNLAVNNRGQNIKLNPKIIDSIPDKGLVEKIVKFCKSVIPRKGTKAPPRLCIRVNNRELFFVASESSYNENDINTPKEIDDTTNLNNNYRNNLDEVILDYNSETIPQISNQTLNTLVQDDSYVPRYDSNGTSEIEEHNVVDLNVFFYLHAQKVPEGETNISLTSSIDTALSEESQVYTFFSSEFINTINKPVHAALFISWINQVIRDFTTEATQKSTFDKIADISLVVPYVGLALNIGNEVQKENFKEAFELLGAGILLEFVPELLIPTILVFTIKSFIGSSENKNKIIKAINNSLMERETKWKEIYSWIVSNWLTRINTQFNKRKEQMYQALQNQVDAIKTVIEYKYNNYTSDERNRLESEYNINNIREELNKKVSLAMENIERFITESSIFYLMKLINEAKVSKLREYDEGVKEYLLDYISEHRSILGNSVQELNDLVTSTLNNSIPFELSSYTNDKILILYFNKLYIINTSILNLRYESNHLIDLSRYASKINIGSKVNFDPIDKNQIQLFNLESSKIEVILKNAIVYNSMYENFSTSFWIRIPKYFNSISLNNEYTIINCMENNSGWKVSLNYGEIIWTLQDTQEIKQRVVFKYSQMINISDYINRWIFVTITNNRLNNSKIYINGRLIDQKPISNLGNIHASNNIMFKLDGCRDTHRYIWIKYFNLFDKELNEKEIKDLYDNQSNSGILKDFWGDYLQYDKPYYMLNLYDPNKYVDVNNVGIRGYMYLKGPRGSVMTTNIYLNSSLYRGTKFIIKKYASGNKDNIVRNNDRVYINVVVKNKEYRLATNASQAGVEKILSALEIPDVGNLSQVVVMKSKNDQGITNKCKMNLQDNNGNDIGFIGFHQFNNIAKLVASNWYNRQIERSSRTLGCSWEFIPVDDGWGERPL

SEQ ID NO: 111 - protein, 1286 aa, Artificial Sequence
  Synthetic
  misc_feature (7)..(7): Xaa can be any naturally occurring amino acid
MPVNIKXFNYNDPINNDDIIMMEPFNDPGPGTYYKAFRIIDRIWIVPERFTYGFQPDQFNASTGVFSKDVYEYYDPTYLKTDAEKDKFLKTMIKLFNRINSKPSGQRLLDMIVDAIPYLGNASTPPDKFAANVANVSINKKIIQPGAEDQIKGLMTNLIIFGPGPVLSDNFTDSMIMNGHSPISEGFGARMMIRFCPSCLNVFNNVQENKDTSIFSRRAYFADPALTLMHELIHVLHGLYGIKISNLPITPNTKEFFMQHSDPVQAEELYTFGGHDPSVISPSTDMNIYNKALQNFQDIANRLNIVSSAQGSGIDISLYKQIYKNKYDFVEDPNGKYSVDKDKFDKLYKALMFGFTETNLAGEYGIKTRYSYFSEYLPPIKTEKLLDNTIYTQNEGFNIASKNLKTEFNGQNKAVNKEAYEEISLEHLVIYRIAMCKPVMYKNTGKSEQCIIVNNEDLFFIANKDSFSKDLAKAETIAYNTQNNTIENNFSIDQLILDNDLSSGIDLPNENTEPFTNFDDIDIPVYIKQSALKKIFVDGDSLFEYLHAQTFPSNIENLQLTNSLNDALRNNNKVYTFFSTNLVEKANTVVGASLFVNWVKGVIDDFTSESTQKSTIDKVSDVSIIIPYIGPALNVGNETAKENFKNAFEIGGAAILMEFIPELIVPIVGFFTLESYVGNKGHIIMTISNALKKRDQKWTDMYGLIVSQWLSTVNTQFYTIKERMYNALNNQSQAIEKIIEDQYNRYSEEDKMNINIDFNDIDFKLNQSINLAINNIDDFINQCSISYLMNRMIPLAVKKLKDFDDNLKRDLLEYIDTNELYLLDEVNILKSKVNRHLKDSIPFDLSLYTKDTILIQVFNNYIIINTSILNLRYESNHLIDLSRYASKINIGSKVNFDPIDKNQIQLFNLESSKIEVILKNAIVYNSMYENFSTSFWIRIPKYFNSISLNNEYTIINCMENNSGWKVSLNYGEIIWTLQDTQEIKQRVVFKYSQMINISDYINRWIFVTITNNRLNNSKIYINGRLIDQKPISNLGNIHASNNIMFKLDGCRDTHRYIWIKYFNLFDKELNEKEIKDLYDNQSNSGILKDFWGDYLQYDKPYYMLNLYDPNKYVDVNNVGIRGYMYLKGPRGSVMTTNIYLNSSLYRGTKFIIKKYASGNKDNIVRNNDRVYINVVVKNKEYRLATNASQAGVEKILSALEIPDVGNLSQVVVMKSKNDQGITNKCKMNLQDNNGNDIGFIGFHQFNNIAKLVASNWYNRQIERSSRTLGCSWEFIPVDDGWGERPL

SEQ ID NO: 112 - protein, 1282 aa, Artificial Sequence
  Synthetic
MPVVINSFNYDDPVNDNTIIYIRPPYYETSNTYFKAFQIMDNVWIIPERYRLGIDPSLFNPPVSLKAGSDGYFDPNYLSTNTEKNKYLQIMIKLFKRINSKPAGQILLEEIKNAIPYLGNSYTQEEQFTTNNRTVSFNVKLANGNIVQQMANLIIWGPGPDLTTNKTGGIIYSPYQSMEATPYKDGFGSIMTVEFSPEYATAFNDISIASHSPSLFIKDPALILMHELIHVLHGLYGTYITEYKITPNVVQSYMKVTKPITSAEFLTFGGRDRNIVPQSIQSQLYNKVLSDYKRIASRLNKVNTATALINIDEFKNLYEWKYQFAKDSNGVYSVDLNKFEQLYKKIYSFTEFNLAYEFKIKTRLGYLAENFGPFYLPNLLDDSIYTEVDGFNIGALSINYQGQNIGSDINSIKKLQGQGVVSRVVRLCSNSNTKNSLCITVNNRDLFFIASQESYGENTINTYKEIDDTTTLDPSFEDILDKVILNFNEQVIPQMPNRNVSTDIQKDNYIPKYDYNRTDIIDSYEVGRNYNTFFYLNAQKFSPNESNITLTSSFDTGLLEGSKVYTFFSSDFINNINKPVQALLFIEWVKQVIRDFTTEATKTSTVDKLKDISLVVPYIGLALNIGDEIYKQHFAEAVELVGAGLLLEFSPEFLIPTLLIFTIKGYLTGSIRDKDKIIKTLDNALNVRDQKWKELYRWVVSKWLTTINTQFNKRKEQMYKALKNQATAIKKIIENKYNNYTTDEKSKIDSSYNINEIERTLNEKINLAMKNIEQFITESSIAYLINIINNETIQKLKSYDDLVRRYLLGYIRNHSSILGNSVEELNSKVNNHLDNGIPFELSSYTNDSLLIRYFNKNYIINTSILNLRYESNHLIDLSRYASKINIGSKVNFDPIDKNQIQLFNLESSKIEVILKNAIVYNSMYENFSTSFWIRIPKYFNSISLNNEYTIINCMENNSGWKVSLNYGEIIWTLQDTQEIKQRVVFKYSQMINISDYINRWIFVTITNNRLNNSKIYINGRLIDQKPISNLGNIHASNNIMFKLDGCRDTHRYIWIKYFNLFDKELNEKEIKDLYDNQSNSGILKDFWGDYLQYDKPYYMLNLYDPNKYVDVNNVGIRGYMYLKGPRGSVMTTNIYLNSSLYRGTKFIIKKYASGNKDNIVRNNDRVYINVVVKNKEYRLATNASQAGVEKILSALEIPDVGNLSQVVVMKSKNDQGITNKCKMNLQDNNGNDIGFIGFHQFNNIAKLVASNWYNRQIERSSRTLGCSWEFIPVDDGWGERPL

SEQ ID NO: 113 - protein, 1313 aa, Artificial Sequence
  Synthetic
MKLEINKFNYNDPIDGINVITMRPPRHSDKINKGKGPFKAFQVIKNIWIVPERYNFTNNTNDLNIPSEPIMEADAIYNPNYLNTPSEKDEFLQGVIKVLERIKSKPEGEKLLELISSSIPLPLVSNGALTLSDNETIAYQENNNIVSNLQANLVIYGPGPDIANNATYGLYSTPISNGEGTLSEVSFSPFYLKPFDESYGNYRSLVNIVNKFVKREFAPDPASTLMHELVHVTHNLYGISNRNFYYNFDTGKIETSRQQNSLIFEELLTFGGIDSKAISSLIIKKIIETAKNNYTTLISERLNTVTVENDLLKYIKNKIPVQGRLGNFKLDTAEFEKKLNTILFVLNESNLAQRFSILVRKHYLKERPIDPIYVNILDDNSYSTLEGFNISSQGSNDFQGQLLESSYFEKIESNALRAFIKICPRNGLLYNAIYRNSKNYLNNIDLEDKKTTSKTNVSYPCSLLNGCIEVENKDLFLISNKDSLNDINLSEEKIKPETTVFFKDKLPPQDITLSNYDFTEANSIPSISQQNILERNEELYEPIRNSLFEIKTIYVDKLTTFHFLEAQNIDESIDSSKIRVELTDSVDEALSNPNKVYSPFKNMSNTINSIETGITSTYIFYQWLRSIVKDFSDETGKIDVIDKSSDTLAIVPYIGPLLNIGNDIRHGDFVGAIELAGITALLEYVPEFTIPILVGLEVIGGELAREQVEAIVNNALDKRDQKWAEVYNITKAQWWGTIHLQINTRLAHTYKALSRQANAIKMNMEFQLANYKGNIDDKAKIKNAISETEILLNKSVEQAMKNTEKFMIKLSNSYLTKEMIPKVQDNLKNFDLETKKTLDKFIKEKEDILGTNLSSSLRRKVSIRLNKNIAFDINDIPFSEFDDLINQYKIINTSILNLRYESNHLIDLSRYASKINIGSKVNFDPIDKNQIQLFNLESSKIEVILKNAIVYNSMYENFSTSFWIRIPKYFNSISLNNEYTIINCMENNSGWKVSLNYGEIIWTLQDTQEIKQRVVFKYSQMINISDYINRWIFVTITNNRLNNSKIYINGRLIDQKPISNLGNIHASNNIMFKLDGCRDTHRYIWIKYFNLFDKELNEKEIKDLYDNQSNSGILKDFWGDYLQYDKPYYMLNLYDPNKYVDVNNVGIRGYMYLKGPRGSVMTTNIYLNSSLYRGTKFIIKKYASGNKDNIVRNNDRVYINVVVKNKEYRLATNASQAGVEKILSALEIPDVGNLSQVVVMKSKNDQGITNKCKMNLQDNNGNDIGFIGFHQFNNIAKLVASNWYNRQIERSSRTLGCSWEFIPVDDGWGERPL

SEQ ID NO: 114 - protein, 1298 aa, Artificial Sequence
  Synthetic
MVTINDLHYSDPIDEDNIINMRIPLYDLEVDDQFINHNVPDLKAFQVFPNVWVVPERYTFYSTMKNLDAPANPSRSSYYDPTYLQSDAEKEVFLQQMILLFKRINSTQEGQQFLNLLSRSIPVPYESNGDVAMGTTQVIKQMDDKGNVLKHRRAHIIIYGPGPDLMAKGSKALTKSRETGRGCMAEIYFSPMYHKTYSTKLTNKNSLVDKSVQEFVPDPAVTLIHELCHGLHALYGIDLGNVGSWEFNSNPNSLFSSWFSSKEAVNFEEVMTFGGEDVKVIKSEIDKKIPGILNLIKTTVEPIINKITDPHDEMLQCLQSKYPSLKGTLGQFFFDDTQLEKDIRDLWMVMNETMFAENLKALTRARYLVPKVENIVQVDILSPNVYTIDKGFNHLSKGFKGQSVSQSYFRKISALARGAVVRACPNPHFSSQRGLSSCIEILEDDLFIMSSKDSFTDTDFSEPSVGPVSYKAKKGADTILDSTLSNYDFSKEINFTSTVPIITVEDPLETDEDVPVISEDRTVYVDDYTTFHFLEAQKIGKEVVPTQTKVVFTTNMEEALFDSKKVYTVFENTASRINEAGTGIANGMMFYQWLKGIVQDFTEEATQKDTFDKISDVTMIVPYLGNILNIGNDIRKGDFMGAVELGGVTILLEAIPELTLPVLIGLTIIEDELEKEQVSQTVYNVLDKRDEKWEEVYGFVKQQWWWMVHTQFETRILHAYQALNHQVEAIKANMTYQLANYRGNQEDKELLEKAIDDTLQSLYYAVDQAMHNIKRFLIQSSKSYLLNQMLPKTKEQLLAFDQQTLRNVNDFINKNQGVLGESLAKDLKKKVEKRLTSLPVFNLEDLPISEFEDLIHSHEIDIQDSEVLNIGVNNIINTSILNLRYESNHLIDLSRYASKINIGSKVNFDPIDKNQIQLFNLESSKIEVILKNAIVYNSMYENFSTSFWIRIPKYFNSISLNNEYTIINCMENNSGWKVSLNYGEIIWTLQDTQEIKQRVVFKYSQMINISDYINRWIFVTITNNRLNNSKIYINGRLIDQKPISNLGNIHASNNIMFKLDGCRDTHRYIWIKYFNLFDKELNEKEIKDLYDNQSNSGILKDFWGDYLQYDKPYYMLNLYDPNKYVDVNNVGIRGYMYLKGPRGSVMTTNIYLNSSLYRGTKFIIKKYASGNKDNIVRNNDRVYINVVVKNKEYRLATNASQAGVEKILSALEIPDVGNLSQVVVMKSKNDQGITNKCKMNLQDNNGNDIGFIGFHQFNNIAKLVASNWYNRQIERSSRTLGCSWEFIPVDDGWGERPL

SEQ ID NO: 115 - protein, 1281 aa, Artificial Sequence
  Synthetic
MPVTINNFNYNDPIDNNNIIMMEPPFARGTGRYYKAFKITDRIWIIPERYTFGYKPEDFNKSSGIFNRDVCEYYDPDYLNTNDKKNIFLQTMIKLFNRIKSKPLGEKLLEMIINGIPYLGDRRVPLEEFNTNIASVTVNKLISNPGEVERKKGIFANLIIFGPGPVLNENETIDIGIQNHFASREGFGGIMQMKFCPEYVSVFNNVQENKGASIFNRRGYFSDPALILMHELIHVLHGLYGIKVDDLPIVPNEKKFFMQSTDAIQAEELYTFGGQDPSIITPSTDKSIYDKVLQNFRGIVDRLNKVLVCISDPNININIYKNKFKDKYKFVEDSEGKYSIDVESFDKLYKSLMFGFTETNIAENYKIKTRASYFSDSLPPVKIKNLLDNEIYTIEEGFNISDKDMEKEYRGQNKAINKQAYEEISKEHLAVYKIQMCKSVKAPGICIDVDNEDLFFIADKNSFSDDLSKNERIEYNTQSNYIENDFPINELILDTDLISKIELPSENTESLTDFNVDVPVYEKQPAIKKIFTDENTIFQYLYSQTFPLDIRDISLTSSFDDALLFSNKVYSFFSMDYIKTANKVVEAGLFAGWVKQIVNDFVIEANKSNTMDKIADISLIVPYIGLALNVGNETAKGNFENAFEIAGASILLEFIPELLIPVVGAFLLESYIDNKNKIIKTIDNALTKRNEKWSDMYGLIVAQWLSTVNTQFYTIKEGMYKALNYQAQALEEIIKYRYNIYSEKEKSNINIDFNDINSKLNEGINQAIDNINNFINGCSVSYLMKKMIPLAVEKLLDFDNTLKKNLLNYIDENKLYLIGSAEYEKSKVNKYLKTIMPFDLSIYTNDTILIEMFNKYNIVNTSILSIVYKKDDLIDLSRYGAKINIGDRVYYDSIDKNQIKLINLESSTIEVILKNAIVYNSMYENFSTSFWIKIPKYFSKINLNNEYTIINCIENNSGWKVSLNYGEIIWTLQDNKQNIQRVVFKYSQMVNISDYINRWIFVTITNNRLTKSKIYINGRLIDQKPISNLGNIHASNKIMFKLDGCRDPRRYIMIKYFNLFDKELNEKEIKDLYDSQSNSGILKDFWGNYLQYDKPYYMLNLFDPNKYVDVNNIGIRGYMYLKGPRGSVVTTNIYLNSTLYEGTKFIIKKYASGNEDNIVRNNDRVYINVVVKNKEYRLATNASQAGVEKILSALEIPDVGNLSQVVVMKSKDDQGIRNKCKMNLQDNNGNDIGFIGFHLYDNIAKLVASNWYNRQVGKASRTFGCSWEFIPVDDGWGESSL

SEQ ID NO: 116 - protein, 1294 aa, Artificial Sequence
  Synthetic
MPITINNFNYSDPVDNKNILYLDTHLNTLANEPEKAFRITGNIWVIPDRFSRNSNPNLNKPPRVTSPKSGYYDPNYLSTDSDKDTFLKEIIKLFKRINSREIGEELIYRLSTDIPFPGNNNTPINTFDFDVDFNSVDVKTRQGNNWVKTGSINPSVIITGPRENIIDPETSTFKLTNNTFAAQEGFGALSIISISPRFMLTYSNATNDVGEGRFSKSEFCMDPILILMHELNHAMHNLYGIAIPNDQTISSVTSNIFYSQYNVKLEYAEIYAFGGPTIDLIPKSARKYFEEKALDYYRSIAKRLNSITTANPSSFNKYIGEYKQKLIRKYRFVVESSGEVTVNRNKFVELYNELTQIFTEFNYAKIYNVQNRKIYLSNVYTPVTANILDDNVYDIQNGFNIPKSNLNVLFMGQNLSRNPALRKVNPENMLYLFTKFCHKAIDGRSLYNKTLDCRELLVKNTDLPFIGDISDVKTDIFLRKDINEETEVIYYPDNVSVDQVILSKNTSEHGQLDLLYPSIDSESEILPGENQVFYDNRTQNVDYLNSYYYLESQKLSDNVEDFTFTRSIEEALDNSAKVYTYFPTLANKVNAGVQGGLFLMWANDVVEDFTTNILRKDTLDKISDVSAIIPYIGPALNISNSVRRGNFTEAFAVTGVTILLEAFPEFTIPALGAFVIYSKVQERNEIIKTIDNCLEQRIKRWKDSYEWMMGTWLSRIITQFNNISYQMYDSLNYQAGAIKAKIDLEYKKYSGSDKENIKSQVENLKNSLDVKISEAMNNINKFIRECSVTYLFKNMLPKVIDELNEFDRNTKAKLINLIDSHNIILVGEVDKLKAKVNNSFQNTIPFNIFSYTNNSLLKDIINEYFNNINDIVNTSILSIVYKKDDLIDLSRYGAKINIGDRVYYDSIDKNQIKLINLESSTIEVILKNAIVYNSMYENFSTSFWIKIPKYFSKINLNNEYTIINCIENNSGWKVSLNYGEIIWTLQDNKQNIQRVVFKYSQMVNISDYINRWIFVTITNNRLTKSKIYINGRLIDQKPISNLGNIHASNKIMFKLDGCRDPRRYIMIKYFNLFDKELNEKEIKDLYDSQSNSGILKDFWGNYLQYDKPYYMLNLFDPNKYVDVNNIGIRGYMYLKGPRGSVVTTNIYLNSTLYEGTKFIIKKYASGNEDNIVRNNDRVYINVVVKNKEYRLATNASQAGVEKILSALEIPDVGNLSQVVVMKSKDDQGIRNKCKMNLQDNNGNDIGFIGFHLYDNIAKLVASNWYNRQVGKASRTFGCSWEFIPVDDGWGESSL

SEQ ID NO: 117 - protein, 1286 aa, Artificial Sequence
  Synthetic
MTWPVKDFNYSDPVNDNDILYLRIPQNKLITTPVKAFMITQNIWVIPERFSSDTNPSLSKPPRPTSKYQSYYDPSYLSTDEQKDTFLKGIIKLFKRINERDIGKKLINYLVVGSPFMGDSSTPEDTFDFTRHTTNIAVEKFENGSWKVTNIITPSVLIFGPLPNILDYTASLTLQGQQSNPSFEGFGTLSILKVAPEFLLTFSDVTSNQSSAVLGKSIFCMDPVIALMHELTHSLHQLYGINIPSDKRIRPQVSEGFFSQDGPNVQFEELYTFGGLDVEIIPQIERSQLREKALGHYKDIAKRLNNINKTIPSSWISNIDKYKKIFSEKYNFDKDNTGNFVVNIDKFNSLYSDLTNVMSEVVYSSQYNVKNRTHYFSRHYLPVFANILDDNIYTIRDGFNLTNKGFNIENSGQNIERNPALQKLSSESVVDLFTKVCLRLTKNSRDDSTCIKVKNNRLPYVADKDSISQEIFENKIITDETNVQNYSDNFSLDESILDGQVPINPEIVDPLLPNVNMEPLNLPGEEIVFYDDITKYVDYLNSYYYLESQKLSNNVENITLTTSVEEALGYSNKIYTFLPSLAEKVNKGVQAGLFLNWANEVVEDFTTNIMKKDTLDKISDVSVIIPYIGPALNIGNSALRGNFKQAFATAGVAFLLEGFPEFTIPALGVFTFYSSIQEREKIIKTIENCLEQRVKRWKDSYQWMVSNWLSRITTQFNHINYQMYDSLSYQADAIKAKIDLEYKKYSGSDKENIKSQVENLKNSLDVKISEAMNNINKFIRECSVTYLFKNMLPKVIDELNKFDLRTKTELINLIDSHNIILVGEVDRLKAKVNESFENTMPFNIFSYTNNSLLKDIINEYFNIVNTSILSIVYKKDDLIDLSRYGAKINIGDRVYYDSIDKNQIKLINLESSTIEVILKNAIVYNSMYENFSTSFWIKIPKYFSKINLNNEYTIINCIENNSGWKVSLNYGEIIWTLQDNKQNIQRVVFKYSQMVNISDYINRWIFVTITNNRLTKSKIYINGRLIDQKPISNLGNIHASNKIMFKLDGCRDPRRYIMIKYFNLFDKELNEKEIKDLYDSQSNSGILKDFWGNYLQYDKPYYMLNLFDPNKYVDVNNIGIRGYMYLKGPRGSVVTTNIYLNSTLYEGTKFIIKKYASGNEDNIVRNNDRVYINVVVKNKEYRLATNASQAGVEKILSALEIPDVGNLSQVVVMKSKDDQGIRNKCKMNLQDNNGNDIGFIGFHLYDNIAKLVASNWYNRQVGKASRTFGCSWEFIPVDDGWGESSL

SEQ ID NO: 118 - protein, 1268 aa, Artificial Sequence
  Synthetic
MPKINSFNYNDPVNDRTILYIKPGGCQEFYKSFNIMKNIWIIPERNVIGTTPQDFHPPTSLKNGDSSYYDPNYLQSDEEKDRFLKIVTKIFNRINNNLSGGILLEELSKANPYLGNDNTPDNQFHIGDASAVEIKFSNGSQDILLPNVIIMGAEPDLFETNSSNISLRNNYMPSNHRFGSIAIVTFSPEYSFRFNDNCMNEFIQDPALTLMHELIHSLHGLYGAKGITTKYTITQKQNPLITNIRGTNIEEFLTFGGTDLNIITSAQSNDIYTNLLADYKKIASKLSKVQVSNPLLNPYKDVFEAKYGLDKDASGIYSVNINKFNDIFKKLYSFTEFDLRTKFQVKCRQTYIGQYKYFKLSNLLNDSIYNISEGYNINNLKVNFRGQNANLNPRIITPITGRGLVKKIIRFCKNIVSVKGIRKSICIEINNGELFFVASENSYNDDNINTPKEIDDTVTSNNNYENDLDQVILNFNSESAPGLSDEKLNLTIQNDAYIPKYDSNGTSDIEQHDVNELNVFFYLDAQKVPEGENNVNLTSSIDTALLEQPKIYTFFSSEFINNVNKPVQAALFVSWIQQVLVDFTTEANQKSTVDKIADISIVVPYIGLALNIGNEAQKGNFKDALELLGAGILLEFEPELLIPTILVFTIKSFLGSSDNKNKVIKAINNALKERDEKWKEVYSFIVSNWMTKINTQFNKRKEQMYQALQNQVNAIKTIIESKYNSYTLEEKNELTNKYDIKQIENELNQKVSIAMNNIDRFLTESSISYLMKIINEVKINKLREYDENVKTYLLNYIIQHGSILGESQQELNSMVTDTLNNSIPFKLSSYTDDKILISYFNKFFIVNTSILSIVYKKDDLIDLSRYGAKINIGDRVYYDSIDKNQIKLINLESSTIEVILKNAIVYNSMYENFSTSFWIKIPKYFSKINLNNEYTIINCIENNSGWKVSLNYGEIIWTLQDNKQNIQRVVFKYSQMVNISDYINRWIFVTITNNRLTKSKIYINGRLIDQKPISNLGNIHASNKIMFKLDGCRDPRRYIMIKYFNLFDKELNEKEIKDLYDSQSNSGILKDFWGNYLQYDKPYYMLNLFDPNKYVDVNNIGIRGYMYLKGPRGSVVTTNIYLNSTLYEGTKFIIKKYASGNEDNIVRNNDRVYINVVVKNKEYRLATNASQAGVEKILSALEIPDVGNLSQVVVMKSKDDQGIRNKCKMNLQDNNGNDIGFIGFHLYDNIAKLVASNWYNRQVGKASRTFGCSWEFIPVDDGWGESSL

SEQ ID NO: 119 - protein, 1287 aa, Artificial Sequence
  Synthetic
MPVVINSFNYNDPVNDDTILYMQIPYEEKSKKYYKAFEIMRNVWIIPERNTIGTDPSDFDPPASLENGSSAYYDPNYLTTDAEKDRYLKTTIKLFKRINSNPAGEVLLQEISYAKPYLGNEHTPINEFHPVTRTTSVNIKSSTNVKSSIILNLLVLGAGPDIFENSSYPVRKLMDSGGVYDPSNDGFGSINIVTFSPEYEYTFNDISGGYNSSTESFIADPAISLAHELIHALHGLYGARGVTYKETIKVKQAPLMIAEKPIRLEEFLTFGGQDLNIITSAMKEKIYNNLLANYEKIATRLSRVNSAPPEYDINEYKDYFQWKYGLDKNADGSYTVNENKFNEIYKKLYSFTEIDLANKFKVKCRNTYFIKYGFLKVPNLLDDDIYTVSEGFNIGNLAVNNRGQNIKLNPKIIDSIPDKGLVEKIVKFCKSVIPRKGTKAPPRLCIRVNNRELFFVASESSYNENDINTPKEIDDTTNLNNNYRNNLDEVILDYNSETIPQISNQTLNTLVQDDSYVPRYDSNGTSEIEEHNVVDLNVFFYLHAQKVPEGETNISLTSSIDTALSEESQVYTFFSSEFINTINKPVHAALFISWINQVIRDFTTEATQKSTFDKIADISLVVPYVGLALNIGNEVQKENFKEAFELLGAGILLEFVPELLIPTILVFTIKSFIGSSENKNKIIKAINNSLMERETKWKEIYSWIVSNWLTRINTQFNKRKEQMYQALQNQVDAIKTVIEYKYNNYTSDERNRLESEYNINNIREELNKKVSLAMENIERFITESSIFYLMKLINEAKVSKLREYDEGVKEYLLDYISEHRSILGNSVQELNDLVTSTLNNSIPFELSSYTNDKILILYFNKLYIVNTSILSIVYKKDDLIDLSRYGAKINIGDRVYYDSIDKNQIKLINLESSTIEVILKNAIVYNSMYENFSTSFWIKIPKYFSKINLNNEYTIINCIENNSGWKVSLNYGEIIWTLQDNKQNIQRVVFKYSQMVNISDYINRWIFVTITNNRLTKSKIYINGRLIDQKPISNLGNIHASNKIMFKLDGCRDPRRYIMIKYFNLFDKELNEKEIKDLYDSQSNSGILKDFWGNYLQYDKPYYMLNLFDPNKYVDVNNIGIRGYMYLKGPRGSVVTTNIYLNSTLYEGTKFIIKKYASGNEDNIVRNNDRVYINVVVKNKEYRLATNASQAGVEKILSALEIPDVGNLSQVVVMKSKDDQGIRNKCKMNLQDNNGNDIGFIGFHLYDNIAKLVASNWYNRQVGKASRTFGCSWEFIPVDDGWGESSL

SEQ ID NO: 120 - protein, 1286 aa, Artificial Sequence
  Synthetic
  misc_feature (7)..(7): Xaa can be any naturally occurring amino acid
MPVNIKXFNYNDPINNDDIIMMEPFNDPGPGTYYKAFRIIDRIWIVPERFTYGFQPDQFNASTGVFSKDVYEYYDPTYLKTDAEKDKFLKTMIKLFNRINSKPSGQRLLDMIVDAIPYLGNASTPPDKFAANVANVSINKKIIQPGAEDQIKGLMTNLIIFGPGPVLSDNFTDSMIMNGHSPISEGFGARMMIRFCPSCLNVFNNVQENKDTSIFSRRAYFADPALTLMHELIHVLHGLYGIKISNLPITPNTKEFFMQHSDPVQAEELYTFGGHDPSVISPSTDMNIYNKALQNFQDIANRLNIVSSAQGSGIDISLYKQIYKNKYDFVEDPNGKYSVDKDKFDKLYKALMFGFTETNLAGEYGIKTRYSYFSEYLPPIKTEKLLDNTIYTQNEGFNIASKNLKTEFNGQNKAVNKEAYEEISLEHLVIYRIAMCKPVMYKNTGKSEQCIIVNNEDLFFIANKDSFSKDLAKAETIAYNTQNNTIENNFSIDQLILDNDLSSGIDLPNENTEPFTNFDDIDIPVYIKQSALKKIFVDGDSLFEYLHAQTFPSNIENLQLTNSLNDALRNNNKVYTFFSTNLVEKANTVVGASLFVNWVKGVIDDFTSESTQKSTIDKVSDVSIIIPYIGPALNVGNETAKENFKNAFEIGGAAILMEFIPELIVPIVGFFTLESYVGNKGHIIMTISNALKKRDQKWTDMYGLIVSQWLSTVNTQFYTIKERMYNALNNQSQAIEKIIEDQYNRYSEEDKMNINIDFNDIDFKLNQSINLAINNIDDFINQCSISYLMNRMIPLAVKKLKDFDDNLKRDLLEYIDTNELYLLDEVNILKSKVNRHLKDSIPFDLSLYTKDTILIQVFNNYIIVNTSILSIVYKKDDLIDLSRYGAKINIGDRVYYDSIDKNQIKLINLESSTIEVILKNAIVYNSMYENFSTSFWIKIPKYFSKINLNNEYTIINCIENNSGWKVSLNYGEIIWTLQDNKQNIQRVVFKYSQMVNISDYINRWIFVTITNNRLTKSKIYINGRLIDQKPISNLGNIHASNKIMFKLDGCRDPRRYIMIKYFNLFDKELNEKEIKDLYDSQSNSGILKDFWGNYLQYDKPYYMLNLFDPNKYVDVNNIGIRGYMYLKGPRGSVVTTNIYLNSTLYEGTKFIIKKYASGNEDNIVRNNDRVYINVVVKNKEYRLATNASQAGVEKILSALEIPDVGNLSQVVVMKSKDDQGIRNKCKMNLQDNNGNDIGFIGFHLYDNIAKLVASNWYNRQVGKASRTFGCSWEFIPVDDGWGESSL

SEQ ID NO: 121 - protein, 1282 aa, Artificial Sequence
  Synthetic
MPVVINSFNYDDPVNDNTIIYIRPPYYETSNTYFKAFQIMDNVWIIPERYRLGIDPSLFNPPVSLKAGSDGYFDPNYLSTNTEKNKYLQIMIKLFKRINSKPAGQILLEEIKNAIPYLGNSYTQEEQFTTNNRTVSFNVKLANGNIVQQMANLIIWGPGPDLTTNKTGGIIYSPYQSMEATPYKDGFGSIMTVEFSPEYATAFNDISIASHSPSLFIKDPALILMHELIHVLHGLYGTYITEYKITPNVVQSYMKVTKPITSAEFLTFGGRDRNIVPQSIQSQLYNKVLSDYKRIASRLNKVNTATALINIDEFKNLYEWKYQFAKDSNGVYSVDLNKFEQLYKKIYSFTEFNLAYEFKIKTRLGYLAENFGPFYLPNLLDDSIYTEVDGFNIGALSINYQGQNIGSDINSIKKLQGQGVVSRVVRLCSNSNTKNSLCITVNNRDLFFIASQESYGENTINTYKEIDDTTTLDPSFEDILDKVILNFNEQVIPQMPNRNVSTDIQKDNYIPKYDYNRTDIIDSYEVGRNYNTFFYLNAQKFSPNESNITLTSSFDTGLLEGSKVYTFFSSDFINNINKPVQALLFIEWVKQVIRDFTTEATKTSTVDKLKDISLVVPYIGLALNIGDEIYKQHFAEAVELVGAGLLLEFSPEFLIPTLLIFTIKGYLTGSIRDKDKIIKTLDNALNVRDQKWKELYRWVVSKWLTTINTQFNKRKEQMYKALKNQATAIKKIIENKYNNYTTDEKSKIDSSYNINEIERTLNEKINLAMKNIEQFITESSIAYLINIINNETIQKLKSYDDLVRRYLLGYIRNHSSILGNSVEELNSKVNNHLDNGIPFELSSYTNDSLLIRYFNKNYIVNTSILSIVYKKDDLIDLSRYGAKINIGDRVYYDSIDKNQIKLINLESSTIEVILKNAIVYNSMYENFSTSFWIKIPKYFSKINLNNEYTIINCIENNSGWKVSLNYGEIIWTLQDNKQNIQRVVFKYSQMVNISDYINRWIFVTITNNRLTKSKIYINGRLIDQKPISNLGNIHASNKIMFKLDGCRDPRRYIMIKYFNLFDKELNEKEIKDLYDSQSNSGILKDFWGNYLQYDKPYYMLNLFDPNKYVDVNNIGIRGYMYLKGPRGSVVTTNIYLNSTLYEGTKFIIKKYASGNEDNIVRNNDRVYINVVVKNKEYRLATNASQAGVEKILSALEIPDVGNLSQVVVMKSKDDQGIRNKCKMNLQDNNGNDIGFIGFHLYDNIAKLVASNWYNRQVGKASRTFGCSWEFIPVDDGWGESSL

SEQ ID NO: 122 - protein, 1313 aa, Artificial Sequence
  Synthetic
MKLEINKFNYNDPIDGINVITMRPPRHSDKINKGKGPFKAFQVIKNIWIVPERYNFTNNTNDLNIPSEPIMEADAIYNPNYLNTPSEKDEFLQGVIKVLERIKSKPEGEKLLELISSSIPLPLVSNGALTLSDNETIAYQENNNIVSNLQANLVIYGPGPDIANNATYGLYSTPISNGEGTLSEVSFSPFYLKPFDESYGNYRSLVNIVNKFVKREFAPDPASTLMHELVHVTHNLYGISNRNFYYNFDTGKIETSRQQNSLIFEELLTFGGIDSKAISSLIIKKIIETAKNNYTTLISERLNTVTVENDLLKYIKNKIPVQGRLGNFKLDTAEFEKKLNTILFVLNESNLAQRFSILVRKHYLKERPIDPIYVNILDDNSYSTLEGFNISSQGSNDFQGQLLESSYFEKIESNALRAFIKICPRNGLLYNAIYRNSKNYLNNIDLEDKKTTSKTNVSYPCSLLNGCIEVENKDLFLISNKDSLNDINLSEEKIKPETTVFFKDKLPPQDITLSNYDFTEANSIPSISQQNILERNEELYEPIRNSLFEIKTIYVDKLTTFHFLEAQNIDESIDSSKIRVELTDSVDEALSNPNKVYSPFKNMSNTINSIETGITSTYIFYQWLRSIVKDFSDETGKIDVIDKSSDTLAIVPYIGPLLNIGNDIRHGDFVGAIELAGITALLEYVPEFTIPILVGLEVIGGELAREQVEAIVNNALDKRDQKWAEVYNITKAQWWGTIHLQINTRLAHTYKALSRQANAIKMNMEFQLANYKGNIDDKAKIKNAISETEILLNKSVEQAMKNTEKFMIKLSNSYLTKEMIPKVQDNLKNFDLETKKTLDKFIKEKEDILGTNLSSSLRRKVSIRLNKNIAFDINDIPFSEFDDLINQYKIVNTSILSIVYKKDDLIDLSRYGAKINIGDRVYYDSIDKNQIKLINLESSTIEVILKNAIVYNSMYENFSTSFWIKIPKYFSKINLNNEYTIINCIENNSGWKVSLNYGEIIWTLQDNKQNIQRVVFKYSQMVNISDYINRWIFVTITNNRLTKSKIYINGRLIDQKPISNLGNIHASNKIMFKLDGCRDPRRYIMIKYFNLFDKELNEKEIKDLYDSQSNSGILKDFWGNYLQYDKPYYMLNLFDPNKYVDVNNIGIRGYMYLKGPRGSVVTTNIYLNSTLYEGTKFIIKKYASGNEDNIVRNNDRVYINVVVKNKEYRLATNASQAGVEKILSALEIPDVGNLSQVVVMKSKDDQGIRNKCKMNLQDNNGNDIGFIGFHLYDNIAKLVASNWYNRQVGKASRTFGCSWEFIPVDDGWGESSL

SEQ ID NO: 123 - protein, 1298 aa, Artificial Sequence
  Synthetic
MVTINDLHYSDPIDEDNIINMRIPLYDLEVDDQFINHNVPDLKAFQVFPNVWVVPERYTFYSTMKNLDAPANPSRSSYYDPTYLQSDAEKEVFLQQMILLFKRINSTQEGQQFLNLLSRSIPVPYESNGDVAMGTTQVIKQMDDKGNVLKHRRAHIIIYGPGPDLMAKGSKALTKSRETGRGCMAEIYFSPMYHKTYSTKLTNKNSLVDKSVQEFVPDPAVTLIHELCHGLHALYGIDLGNVGSWEFNSNPNSLFSSWFSSKEAVNFEEVMTFGGEDVKVIKSEIDKKIPGILNLIKTTVEPIINKITDPHDEMLQCLQSKYPSLKGTLGQFFFDDTQLEKDIRDLWMVMNETMFAENLKALTRARYLVPKVENIVQVDILSPNVYTIDKGFNHLSKGFKGQSVSQSYFRKISALARGAVVRACPNPHFSSQRGLSSCIEILEDDLFIMSSKDSFTDTDFSEPSVGPVSYKAKKGADTILDSTLSNYDFSKEINFTSTVPIITVEDPLETDEDVPVISEDRTVYVDDYTTFHFLEAQKIGKEVVPTQTKVVFTTNMEEALFDSKKVYTVFENTASRINEAGTGIANGMMFYQWLKGIVQDFTEEATQKDTFDKISDVTMIVPYLGNILNIGNDIRKGDFMGAVELGGVTILLEAIPELTLPVLIGLTIIEDELEKEQVSQTVYNVLDKRDEKWEEVYGFVKQQWWWMVHTQFETRILHAYQALNHQVEAIKANMTYQLANYRGNQEDKELLEKAIDDTLQSLYYAVDQAMHNIKRFLIQSSKSYLLNQMLPKTKEQLLAFDQQTLRNVNDFINKNQGVLGESLAKDLKKKVEKRLTSLPVFNLEDLPISEFEDLIHSHEIDIQDSEVLNIGVNNIVNTSILSIVYKKDDLIDLSRYGAKINIGDRVYYDSIDKNQIKLINLESSTIEVILKNAIVYNSMYENFSTSFWIKIPKYFSKINLNNEYTIINCIENNSGWKVSLNYGEIIWTLQDNKQNIQRVVFKYSQMVNISDYINRWIFVTITNNRLTKSKIYINGRLIDQKPISNLGNIHASNKIMFKLDGCRDPRRYIMIKYFNLFDKELNEKEIKDLYDSQSNSGILKDFWGNYLQYDKPYYMLNLFDPNKYVDVNNIGIRGYMYLKGPRGSVVTTNIYLNSTLYEGTKFIIKKYASGNEDNIVRNNDRVYINVVVKNKEYRLATNASQAGVEKILSALEIPDVGNLSQVVVMKSKDDQGIRNKCKMNLQDNNGNDIGFIGFHLYDNIAKLVASNWYNRQVGKASRTFGCSWEFIPVDDGWGESSL

SEQ ID NO: 124 - protein, 14 aa, Artificial Sequence
  Synthetic
ASLVPRGSGGSAAA

SEQ ID NO: 125 - protein, 6 aa, Artificial Sequence
  Synthetic
LVPRGS

SEQ ID NO: 126 - protein, 5 aa, Artificial Sequence
  Synthetic
LPETG
